United States Patent Application Publication US 2026/0258423 A1 - sequence listing, part 64

SEQ ID NO: 301568 - DNA, 83257441 bp, Homo sapiens (residues 53,370,176-55,504,982 of 83,257,441)
  source 1..83257441: mol_type = genomic DNA
cttaaaaaatggaaacaaaaacacaaataacacacatgccaaattttcaaaagatgaagaattgtaagtagaaaagaatatgacagtttgaatcagaaggacctggattcaaaacgaatttttagcattgctacctgtttgaaaggcgattgccaagagattagccactaccatattgagtttacaaagacaggttgtgaaggtatagaaactccagtaaacaagtttagtgatgaattccaaaaatggccttaattttacccatctttccatatccttgccttttggtaatatgctcctatactaacgggaagcttgttctccattatttacccagtgggttattagcaaatttaacacgagaagaagtttgaaaatgacctgcgtatttctgttttcattcttgtactctttgcatttccatgaacatgtacagaatagcctacaggagaaatgtgagaaagatacatggagaaaaacaaagccaacctagaccagcccacagccagccaaccacaggcatatgagaaaactcagccaatatcagcagggccaccttcaagactcaactgaccacagatgcgtgagggagcccagccaaaactaggggaacttcctgccaatccatagacgtgtaataaataataaatgatgtttgctttcagccactaaatttcttggcagttggttacacagcagtatggtagtaatagataatttatacatcaataaagtgataatattgagaatggaaaggagacatgatggctcaaaggaggcataactgaggaggaaatctttgccaaatctgaaattcactacatacaatgaagtcctcacagcttaggaaacttaacccctggttttgcatgcctactctggaatagaaataactatcaattatctgtaagtcagtgtaaatgattccttacgtgcagatttcacgtctttaaactttgctctcatagaaactcacagactgccaggacctaagtagtcaatcaataaatactctttaaaatatgatggaaaggaagctgtttcacaggttcacacaaccaatcacactaatagagcaaactcaagtccagatatcagaatgtaaatatgaccttcgtatgttttctttataaatatgttactactatatttttataatcctttcttaattataaagttaacatatattaatctcaaaaaatccaccagaaagaaatatgttttgtgtaactagaattaggacagacgagttggacctaactagtctgttctagagccagaacagtagaatggcattttcagtgtattaaaaaagtgaggctaacatatgaaaattggtttaattattacttaagactgaaagagaggtaaatacattttcatatagagaatgactgacagattttaatagtgattatttctgaaataactcctaaatgatttttttaagttacaaatattctgaacccagatggttggagagaagtgtcaaaataattatatttcacaattagactcgtgcaaataaattggcaaatacgtgtgtaattcaaaatatgtactagacatgaataatatgaaataggagcaacttattgatatgaagtcaagacatatataaaataccagacaaaaaatcatgtagaaagtggagcaaggaaatcagaattagagctaagatctatttatcttttggtatcatatagatcagggtcgccatacccccaggttgtggaccagtatccgttcgtgacctgttcgaaactgagtcacacagcaggaggtgagtgtaaggccagtggcactactgcctgagctctgcctcctgtcagatcagaagcagcattagattctcataggagaataaaccctattatgaactgtgcatgcgaggagtctacgttgtgcgttccttgtgagaatctaactagtgcctgatgatctgtggtggaacagtttcaccccaaaaccacctcctgcatctcagctgcacttctgggtctgtggaaaaactgtcttccacaaaacaggaccctcgtgccaaaaaggttggggaccgctgataaagatgactaattttctgctttattatctatgtgaattaaaatttaaacgtaaccttcaaacataaaagaattaggatgtataatatctaaaccaataacaagaataaagggcaatggggtatggttcagtaaaaacaaaaacaaaaccacaaggaaaagaatagtaattggaagtcataatattaaatgattctaaaaactgagtatgtcagtaatcaataaatatgcatggactaaggctacacattgaaaaacaaatagtctcaaatgggatataaagtaatcaattctaaaatatttgtaaatgtagtaactcaaaatatataatggctcaaaaactttaaaaataatggataagacaagatacactgggcaaatacaaacgaaggttagctgctgtgcttatacaaatacatctttaaagacataattaaggatgaagtattcttataagggacataattataaaataaactacttaccagaagaatatcacaattcagatctaatctttatctaacagctaaaactcaaaactaaaaacaaagacaaaattacaaatcgatttttataaatctatagccagagacagggatttaaacatctgtccctcagaaattaacataaattgtaataatgaataatagtttgattttgtaaatatatagactcatattcaacaattaaagcttatatttatatctatgtttaaatctctatctttatatctacatatacattccattcaattcaaaggcacatagaagttttattagaattaacagcatacagacccacttaaataaaatgagtaataccttagaaagataacgaacgtgcaaacatgactcaagaagaaaaagaaaaccaaaaaggtataataattaaaggaattaaataaataaactaaaatttggtacaacttaccccttcatacatacacaagcatcaggcacaaattgttttacagataattttatccaaagcctgaagaatctgataacccttatcttacacaattgttccagaggataaaaatagaaggaatattctcctcacattactttatccgattagcataattttatataaaaggaagacataaataataaaagaaagtaacattatagatcaattttacttacaaatgagatgtcaatactccacacaaaattttatctagttaagtcacaataatgcaagttattctaggatataagaatgtgttagttctactataatgcctagaattctgttccccatctaccacatgaaagaaatattataaacagatatgttagttttgaacttactttttacatgatgctatgaattacttcccgtgtagtcacaatttggaagggtttggctatagagactagttttaattattatacaatattattcaataactttttaaagcgtccctctacatttttaaattttcctcaaaacaatctgtatagtaaataaaatgatgaaactgagaatcaggaaaattaattgaaaagaaaaaaatggttttaatgagctcctctgtgtgaattaccaaaacctcttaagtagcagaatgatcttgaaatgctggatttagattttagatctactttttccccttagcatactcatccattcatatcttgggtggtttcagattatgcgatgtcactgccagttacagtttcatgaatacacattaatacatatttgctaaagtgcaattctagaggcagagtttcaataataagaacattataccttcaatgttatgaatatggtaattttgctgtaaaaaaatcaagcaagaaaacctaattttatcttttaaaataaatacacaaaacaaatctgttgaaacgcataaatacaactggataactagcggaatattttgcccagcaaggatacctcccgagactgaggttcatatccttataaaattcatactataaattctaggtaccatactgcattaagtaactgcaaaaagaagatcgggttatgagttttaagtatatgtacattaatctctgctctgcatacaccaatgttacatttctgaataatagctaatctgatattatgtcaccaaaaatattgtctgttctgagttcttaatctttaacctttccctgaaagagaagaaaaactcaagcaatataattcaaacttattatgcatgaaatagcatgtttaagaaaggaaatatttgcagaaatatataaagccatgaatacattcatattttagcatcctacacatacagtgatataaaacattagtttgtcaccatatatgctcactttacagtgcatgatcttgattctgggtctgttttgtaggtatattagcacacttgccacaatggttattaagtcaccagttacatattacataactgaatgttgctctcttaatgttatagttactcttattttctgtactctagtcatattcaatcacttagtttctctctctcttactccttctttatatccttctgtattaaagactgttagtgctcaacattattcatgacttttttaaattttccaagcagctttgctctaagatgtgtctagttcttgtgatgaattgtgggtagcagtgatatgttgcattttcagatcagggggtgtctggttggcttctccatgctttcttcctccaactgctaattgaatttccttgaatccagaagatgatgggtccacatgatgaaagcagtcttattatttattcaccagttgaaagagagatactcaggacagttgcccagaatagcttgacaagctgcctaggactacaaagtgaatgataaataaacttttttgatttaagacaatgagattttgttattgttgttgttgtttatttttactatagaaaattaccaacttaataatattcctttctctcacctttaaactaatctttattgaataccctatatcatgcattatgcaatggatcagagacacagagatgagagattcagtccctttctttaagcaacttgcaaggtcatattgagtaaaggtgattaagctaaccattacaatgcattttgattaatgcaattgtggagttatccccatggtctctgtagcatgaaggactctagggaggcatcctaggaaaagtgatgcttgaccacaacgtaaagggtaaggatggtttatacagaaggcacagaaaaacctaggcattccgaaaaagtgttcctggggttccaactgggagacctcagggttttgttttcttcaggaagtttgcacaggtgggtaacctagcaaccatttttgattcacaatttctttaatactaatggtcaatgaataatctggtccttttgtttttatcttcgttttcaatctttattttagattcaggaggtaaatgtgaaagtttgttaccttggtatattacatgatactgaggcttggggtacaactgatcccatcacccaggtacggagcacagaacccaatacttttcaacccttgcccccttcctcctccttccctctagtactccccaattcctatttttcctgtccttatgtccatgagtacccaatttttagctcccacttataagtgagaacatggagtatttggttttctgttcctgcattagttcgcttagagtgatggcctccagctacattgatgtaactgcaaaggatatgaatttgttctttttcatggctggatagtattctatggtgtatatatgtaacattttctttattcaatccaccattgataggcacctaggttgaatccatgtctttgctattgcaaatactgttacaaagaacatgcaaatgtgtgtgtcttgattgaatagtttgttttcttttggatatatatacctagtaatggaattgctggatcaaatagcagttctgtataaagttctctgagaaatcttcaactattttccacagtggctgaactaatttacattcctgccaacagtgtataaatgttctcttttctctgcagcctcaccagcatctgttgtttgttgactgtttagtaatagccattctgaatggtgtgaaatggtatctcatcgtggttttgaaatgcattcctctgagaattagtgctgtgtaatgttttttatgtgtttgttggctacttatatgtcttctcttgagaagggtctgttcatgtttttttgcccatttttaatggggttatttaatttttgctttttcaattttgtaaattctgtatagattttgcatattagacctttgtcagatgtgtaatttgcaaatatttcctctcattctgtaggttgtctgtttactcagttgatagtttattttgctgtgcagaaactctttaattagatcccacttgccaatttttgtttttgttgcaattgcttttggggacttagtcaaaaattctttctaaaggctaatgtccagaatagagtttcatggtttttcttcagtgattcttatggttttaggtcttacatttaaatgcttaatcctccttgagttaatttttgtatatggtgaaaggtaggggtccagtttcactcttctgcacatgactatccagttatcccagcactatttattgaatagggagtcctttcttcattgcttatttttgttgactttgttgaagatcaatggctgtaattgtgcagctttattgctgggatttctattctgttccattatttacatgtctgtttttgtgccagtacattgatgttttggttaccgtacccttataatatagcttaaaatcaggtaatgtgctgtctctggctttgttctttttgcttaagattgctttggctattcatgtgcttttttggttccatatgaattttataataattttctctagtcctgtaaaaaatgactttggtagtttgatagaaataagattgagtgtttaaatttctttgggcagtagggctattttaacaatattgtttcttcctatccatgagcatacaatatttttccatttgtttttgctgtttctggtttcttttagcaaggttttgtaattctcattgcataaatctttcatctcctgggttagccaaattcctaagtattttatttttttgtgtctactgtaaatggtgtaaatgggattgtgttcttgatttgactctcagcttgaatattattggtccatagaaatgctactgatttttatacattgatcttgtatcccgaaaatttacttgtgtcatttatcagttccaggagccttttgatggagcctttagggatttctaggtataggatcatactgtccatgatgagagatagttcgactacttcttttcatatctggatgactgttattactttatcttgcctgattgttgtggctaatatttccagtggtatgttgaatacgagtggtgagaatgggcattcttgtcttgtgccaattctcagggaaatgcttccagcttttgcccattcactatgatgttggctgtgtgtctgtcatagacggctcttattattttgatgtatgattctttgacagctagtttattgagggttgtcatcatataaggatgttggactttactgaaagctttttctgcatgtactgagattatcatgtttttgtttttaatactgtttatgtgatgagtccgatttattgagttgtatatgttgaactaaccttgtattccaggaatgaagcctcttgatgatggtaattaactttttgatgtgctgttggatttagtttgctggcattttgttgaggattttttttatctatgttcataaggtatattggtctgtagttttcttttttcattgtacctttgccaagttttggtatcagagtgctgctggcttcatagaatgagttaagcaaaaaaaatccctgcttcatgatttttttggaatagtttcagtagaagtggtaccagcttctctttgtacgactggcagatttagctgtgaactcatctggtccaaggcttttttttggtgggtaggttttttgttactgattcaaattcagaacttgatattgatctgttcatggtttcaatatattcctgattcattcttgagatattgtgtattttaaaaaattatttcatttcttctagattttctaatttatgtacatagaggtgttcataatagtctctgagaatcttttctatttctgtgggattagttgttatgtcacttttgtcatttttgattgtgcttatttggatcttctatttttttctctgtgaatcttggtggcagtctatcaattttgtttatcctttcaaataattcctcttttggttttgttgattcatttatggatggtcgcatctcaatttcatttggttccaatctgattttagttatttaattttttttctcgtagctttggtgttaatttgttcttgtttttctggtttctctatgtgtgttgtttgattattaatttgagatctttctaactttttgaggtaggcattgaaaaaacatgaacttttctcctaacactgcttttgctgtatctcagtgatttgggtatgttttgtctcggttttcatttagttcaaactttttaaaatttttgccttaattttgttttttacctaaaattattcagaaacaagttgtttaatttccatgtaattgagtagttttgagagatcttcttggtattgatttatatttttattccattgtgatatgagtatgtggtttacaagatttcaatttttttgaatttactgaaacttgctttggggccaagcatgtggttaatctcggagtacatttcatgtgcagataagacgaatattctgtggtttacgtgtagagtattctgtagatatctattaggtccaactggtcatgtgttgagcttcagtccagaatttatttgttagttttctgccttgatgatgtgtctaatgctgtcaatgggctattgaactctcccactattattgtgtgtctgtctaaatctttttgtagacctagaagtactggttttatgaatcagaatgctccaattttgggtgcatttatattttattgagtcttccttttgaatgaaccttttatcattatgtaatgctctcctttgttcttttttactgttgttgggttaaagtctgttttatctggtaaaagaatagcaacctctgctctttttccattttctgtttgcatagtatatctttctaaaaccctttactttgagcctatgggtgttattacatgtgagatgcatctcttaaaggcagcagacggatgggtgttatttttttattccaactttctgttctgtgcttttatttatgtatttattttattttttattttttgagacagaatctcactctgtcacccaggctggagtgcagtggcgtgatctcggttcactgcaaacttagcctcccaggttcaagcaattctcctgcctcagcctcccgagtagctgggatcacaggagcccacgaccacactcagctaatttttgtatttttagaagagacgggtttttggcatgttggccaggcctgacctcaggtgatctgcctgcctcatcttcccaacgtgctggatacaggtgtgagccaccgtgcccccccttttgtaccttttaaatgggggcatttagaccatttggattcaaagttaatattgatatgtgaggttttgatcctatcatgaaattgttagctggttgctttgtagtttctattatgtggctgctttatagtgtctgtaggctgtgtacttaagtgtgttttgtgatagcatgtatcattcttttatttccatgtttagaactcccgtaaggatttcatattaggctggtctagttgtaatgattttccttagtgcttgcttgtctggaaaatggtttatttcccttttgcttatgcagtttagtttgggaaaaatgaaattcttggttagaatttattgtatttaagaatgctaaaaataggcccccaatctcttctgacttgtaaggtttatgcttacatgtccactgttaaccttttaatgttatctgacctgtttgtccagctgcctttattattttttttctttagcattgatcttgcacagcctggtgactaaatacctttgggataattgccttatatagcatcttgcaggtgttctctggatttcttgtatctatctatctatctatctatctatctatctatctatctatctatcatctatctctagtaagattaaattttcttgaattatttgtctaaatctgtgttccaggttgtttcctttttctccttctctctcaggaatgcaaataattcataggtttggtatctttacataactctatatttttcaaaaaatgtgttcattttataaaattattttttctttatttttgtctggctggattacttcaaaagaccagtctttaagctctgaaattctttctcttcctttttccagtctattgataaagctttcaattgtgttttgaaattccttaagtgagtttaattcctgaagctgatttttttttaagatttttgtctcttctttaatttcctgggttgtgttgattttcaaatttttttgtctgtcatttctcagtttccattttggttagggaccattgcttaagagtatgattctttgttggtgtcactacattcaaatttttcatggtgccagcatttttatgttggttccttcccatctggagatgctagcacttttcctttctataattggttttgtgcatgtaggagtttttgtttttctttcttccctgtaatattatttttttctctttccctttctctttccctttacgccgtccctaggaggtgtgactgtacagaatgctgggtagggtctttggttttgcttctatagccttatgcacttctttcagcaggctttatattgggttgttcaatttgaactataagtcaatagatactgcttacaggtaagaactggctgtgaccaatagagttgggtatattcctgatcctgtttactggcagaagctctctgctgcatcaggctgtagaatgatttgtggaatgcacagtggtctgagctccctgctcagtcctgggggcatgggggccatgatgggctgggccagtttgggtaggtgtgcctacagatcccccagtgccattcacaagcaccagtgctaaagaagaattgagtaggcagccaccaagcaccaaagtgcgtatagatggaactgaaaaacctttttagccccaagttttctgcataagtatggagggaagcctaaactcaatccaggagagtggttgctccagatgcctggacatcttcctgggaatggagctgagaggaacaccctgcaccaggatctgtgcacagggggaatggggtgagacaggctgctgatctaggtcaaatggtactccaaatgcatgatgcccctctaaaaatctcccatagagcagtcagagctgcttcactaaaacccaaatatgattatatctcttctatggttaaaactctttgataatttcccattgccctgagaaaaaatgtccaaactcttagcaggaatttttgtgttatgacctcagcttatatcactgatataatcttaccacttcctacctcacaacgtatagtctagccatactgattatctgcttaatcctaaaatactatatgttacacaacaatgctctagaacttttctatacacctgaagataaatgcaagctcacataacttcaaaggggatgatgtatagaggtgtctggacaataggatgtagggagattaaggtcctcataggactttagtagttgatgtcagcagacatgggattgttaggcatttttaaaaaaatagtttatctccttgatcaagtgaatctaaatgattgtccaagggatgccaagttctgttgtagctgaaaaataggcagctaagtagttaaatggaagtagattatcactggaatacagcaggttaagcaaagcctatgaaatttaaggcaatatttgttgataactacataaaaggtcatattgtttctctgtagacctctatgagaatttgaaaaacatatatttagggctaagaaagcactgtttctataatacctaagtgataattcactgagttgaaaatgtctcccaatacagtataattatctgaattatagttaataagtgaataatctaattgatttttataatgtcctgaatattgaaagatggtatactgtatgtcaatagctgactgagagaaacacgattctcttgtatatataatcataaaatgctctagagaagaactgaggtaataactaaggcgataaaaactttaattttaattatgccttaaagaatgtgttttagcacaggcatagaaagaaactgtaaaataaatgttgtaaggatcagaagataattggaagaattctagagagttctgaggaatgttttatcctggaaggtaagtttctctagtacagtgttaatagagtctgctgtatggacaaaattgaagagaagaaattaaggaaatgtttcttgagggtaggtcatggcttttgctctttaaacaaacatttattgagctttattttcatactgcatctcatttgaaagtaatgacaatcttatacagaatgcatttaattttgccatttttaagagaagaattgcattcagggaagttaagtgatttttgctaaagttgtactacaacgtcagtttataagataaaatcagaactaaattgtctaaatccagtgcacttttcatgataaattgtgaccatggaagatattaggggatttcatactcacgtttcttagagtacaaactgcaagttacaggaggaccacagaagtctggggaatttattctgtgtgagtttgtatttctatactgagatgtttagtatctgaaccatgaacaaatggattgtgtttaattggctgccatttttctaactttcatctttacaaaaatctttgacataactgtcagcctctatgataagagaaactaaggaaaagagtttttgcctgcacttaggccagaattttaaaaagcattatggacctaggtattgtaagtaatgcagagactcagggaggacagtaacattccgaaacaaagtcagagacatctgatccaatctctcttttctacctggagattccagtctggaatattttttcactggcgctatagaggatgactctattttaaaaacaaagcctcctttatacaggcttattataggcttttgcaattccagccttccattttgtctacacttctttactcccactcataattttcttattgaaatttgggaacccttctaatataatgacagtttttccagtctcatcaagtcaaagaaggcaaagaaggatgtattggaaatgagaaaggaagacaagggcaaaattcaggaactaaactttaacaatttagaaatgcaaacaaatttagtctctacagcattcaaattaaattatacttctaatgtgactttttcattactataaaaagtaatttaatggacttatttaagcattttgagtggaagtaggagtgatattaatgaattaaatatgaacttttgcttaaaatgaattcattcttcaaaatgattcttagtatttttaataaagtactacatttatgtaactaaaatgagcatgagataggtcttaatgtgcttatacgctaataacataagtctataaatgacttgtaaatggtgaagagagactacaggaaactcatccatgtaattatagcaccagataatatctgaggaacatcaatttaatgttttctcatgatttcactacctattactgtcactttgagatcactacaagtcttgctaaatggaattattatttaaatctgtgaattacaaaacaaagacacagtgaacaagcttcttagatgtttcagctgctattctgtaatagattacaaaatgttataacaggtgtgatgggtgatattttattttgttttgatgcagatttattaatcataccactataggactaatgtaataataatattgtggctttaaggaataatgaaagctttcacggaatgacaaacagaaaaaataaatttgtatatggaaagcacagaaaaatatggaggaaagggctagatataaatgtaatttatacacatattagtcactgcagttactatcaacctaagaactaaaccaagagaggtatgttcccatgagttctaaatattactgtagtattatttggtgtctgttttttatttaaaaatcttcacataaaagttaattaaaatttaactttagttttcaatttatttatttttttttataattaattgctcttagatcttggagtagtcgaaaaagacatgagctgcggaattatgtctctaagaaactacatgactttagacaagtatttcatcctctttgggttttaatgtttacagtcttaaaattgagatagcattttaatgtttccaatcttgaaatatggcttaaaattataagccatagttataaaattgaaaattaaaatacagtgtggttagttatttgcctgacacattatacatagtcaatactacatactgacacatttatttcatgttttataggcaagacctatatatatatatacacacacataattatttatatatacatatataattatatataattatccttttataaggcttaagattacagtatatacagatatgtataaaactgctttttagtactaatatccacatgcctgcatgattgaaacagtaaaagaaaataaaaggaactagctataacaaaaaaaatctaaaatcataaaactcctggaagaaaacacaggggaaaggctccctgaccttgaacttggcaacgatttattgaagttgacaccaaaagcacagacaacaaaagcaaaaataagcaagtgagactacctcaaactaaaatgtttctgcacatcaaaggaaacagtcaaaataaaaaggcaatctacatactggaaaaatatttgcagagcatatctgataaggggtttatatccaaaatatataaagaatgcatacaattaaataacaaaaaaaacttgattacaaaattgacaaagaacctgaacagttttcaaagaagacagaaatggccatgtatatgaaaagatgctcaacatcactaatcctcagggaaatgcatatcaaaaccacagtgagatatcacctcacacctgtaaaaatggctattatcaaaaagacaatagataaattttggtgaggaggtaaagaaaaggcaaccattttacactgttggtgggaaggtaaattgttatagccattatggaaaagagtttggaggttcctcaaaaatttaaaaatgtaactaccagtgggatccagtaatctcacttgtggatatatatacaaacaaattgaaagcagtatctttctattgggagttatccaattcccatatttactatagcatgcttcacaatagccaaagtaagagcccaaccttagttttcaccaacagatgatagataaggaaaatgtattgtgtgtgtgtatatataatatatacacacacacataatatgtgtacacccatcatatatatacatatatataatattccatcatatatatacatatatataatattccatcatatatatacacacatatatataatattccatcatatatatatgtatgtatacatatatatatatacacacacacaggatggaatattattcagccttaataaagaaggtaattctgccattcgcaacaacacagatgaacctggaggacattatgctaagtgaaataaatcagacacagaaagataaatgctgcataatatctcctatatttggaatctaaaaaattatgtatgtatacatatatgtaatattccatcatatatatacacacatatatattattccatcatatatatacacacatatatataatattccatcatatatatacacacacacacacacacacacacacacacacaggatggaatattattcagccttaataaagaaggtaattctgccatttgcaacaacacagatgaacctggaggacattatgctaagtgaaataaatcagacacagaaagaaaaatgctgcataacatctcctatatttggaatctaaaaaacatcagactcatggtaacaaagagtagaatggttagcaggacctggggggtggagtaaatattggtcaaagagtacaaacctttagttataagataaacaagttctaatgtacagtaacatgaccatagttgttaataatgtattgtatactcaaaatttgctgagagtagatcttaaatgttctcattacacacacacacagaacaaaaatggtaactttaggacataatggatatgctaattagcttgattgtgctgatcttctcacaatgtatacatacatcaaaacattcatttgataccccttaaacatatgcaattttgattcatcaactataactcaataaagctaggataagcaagagcatcattaaaaaactccttcgtctacacaagaatggtgtaatggcttctatttgcttaggtattatgttgtaaatctgttggtttaatcctgatagtgtttatcataaaatgcaatacagattgatatccctcatctgaaaatcaaaaatacccccaaaatctgacactttttaagtgccaataggacatcacaaattgaaaattacacacccgacctcatgaaataggttatagtcaaaattttgtttcttgcccaaaattattagaaagattgcattaccttcaggctctacatataatggtatatataaaacatacatgaattttgtgtttagccttgggtcccatccccaagatatcttattatgttatgtgcaaacattctgaaatgtgaaaaagtctgaaatatgaaacgcttctggtcccaagcattttgaataggggatactcaaaccgtaatactattttgctgttctgaatggatatggcttagattaggcaagtagaatgtataaagaatcctatgtagagaaatagacacaaaagaacttatagaattttaaaaatgttgttcacatattttccaattctgctttgagtgtctataatgatccattgttcctttactacactagatgtctgcaggtgtatccctaggaagcatatttttatggtttcttccccaaacgcaaatgagttagcaaatgttttcatatctcatttactgtcccagcacttttgcctgaatatccttactcacttcaaaggttctactccaccatcatcaccaggaggtctttctttagtgaatgttccaatctagattttgtgcgtctgtcatcactgctcccttagcctctgctttttacctctaccttgattgaaatactcttttttttgcctatatctcacactagactgtgatcctttttaacgctgcctttttatgcattgttacaggtatcagtcagcatctgacagggtggttgttcaataagtgtctgttgaacgaatggaatgataatttaaagaaagaagataaggagttcatgttactcagaccctaagcaggcaactatatgtctctctgaatgattcactatgataaaagctaacatcaacaaattacctatgatgttttgtcattgtgcccagtaatttatgagcattctttatttattcctatgggccgagtaaggctaatattttcagtgttacattaaagacaaataaaattaagtttagcaatattaaataagttgcccaagactgcactactgtttggacctcaaggtaactttgttccaaaatgtgtgctgttgctataatgccatggtggtttcctcatttaattgaagctctataaattctatgtgtttaatttaagcatcccacatacttataaaacaggaaagaaacaatagttttcttctgttttgactcatataatgattttttaagatggagtccaactccaattcaaacaacaacaacaaaattgcagaaaaaacaagagaaggacttcaaccacatatttcatttgctctgctttttatttttagcaaaatagcatttcaaatagtaaaataatgtattttgttaagaagatattttgggtagtgatcagcctaaaagtcattggtagatttctagttatggaaaaatggaatcactgtatgcccaactcacactagatactagacagagaataatttgtatgtggtgattctaaaggttcatctgaatcttgtaatactttagggtatccacagtgacaatactttctgttgcaaagtcatagaggtgacaggtaaactgattttttttttttttttttgagatggagtcttgctctgtcacccaggctggagtgcagtggctcaatctcagctcactgcaacctccgcctcccgggttcaagcgattcttctgcctcagtctcccaagtagctgggattacaggcacgggccaccatgcctgactaatttttgtatttttagtagggacagggtttcaccatattggccaggctggtcttgaactcctgaccttttgatccgcatgcctcagcctcccaaagtgctgggattacaggcgtgagccaccgcaccccgccctgattttttttgttttgttttcttttagattttaaaattttagtaatctgctcttactaactttgccttttaaaaatgtcccaaactctggatcctcttaattgtttaaacacatgcacacacacagacttacacatacacacacacatacacgcactatatacatctttatcacatttcacaaatatatagttatttggagagaagacatcttatctttgacatattttcaatcttattgagcagtactcagagagcaaaatccacaggcatttgtcttcaatgcaatcatttgtaacctgtttggataattgaactgtcagctttgccctagtcaggatcccctggccattagacacttgtttgctttgtagtagtcagtgttttcatttcaatatactttgttactgcaaagagcactgcctcaaaactaccattaagaagaaaaaatacccagtggcacacaagagagtaaactgccaaaataatgtatatgtaattggaatggtgagtaatctgtcaccaaatctgacgtgtcagtttaatttctcttttcagaagtctgcagcatgaccttccttatgcttcaattgtcttagttaagcataaatattttaaatattaatcttgtaatgtgtagtatactgatattttataacctgaattgttccagaatagtgccaaaacattcacatttggataaaaatatattgcatttgtgcaattctaagaacagtttctgcttcttttgatggcaggcgtgcccttaaaaaacaactaaccatgttccataaaaatgcatattgttttttgacacttcattttcaaatgagttctgggttcactttgaccaggactaacacaggcaggccaaaatgtcaataacttttgggagcacatacagccagtattatttcagaaggaccaagagtacagtctcaggttcaatgcaaaaggcaacaatacagttgaacattctacaattccatcaatctgtagggatcaagaattaaactaaagtttattacaaaaaaaccttgtcttccacagtttttgggaaaagctgctctttgtgcagcctctatccctcttagacacttgcctaaacattatatatttaagtttttttggttgaaaactgccgaggttccaaagacatggtttgatttcaacagaaaaataaagcaaagcaagtgaaacacagcctgcttctgtaatttagagcaattatcttactctttatgaccctcaacaggaaaattaaaatagaatttcctgcttttggattacacatatttgactgctcagtgtattcttcagtgaacagttaataaaatattgtacttgaaataacctggtttatctgtctacttctttaacatttatagcttattagaagactaatatatatgttgaaccctaaataatattttaggcctcctggaaagcaacatatatgatataattttagattatcagaaagttactatttccatcctcaccactaaatctaccatagttcactggggtcctatatcctcaaattgtaagggtaatcctttaataacttaaaatccaaactgatctcaagatttaccctgctattgatgatttttacataatagcaggggataaggaatccacgaacaggtttgggaaagtacaaattaaaaatgagagtttctaggactgagcccccttcactggaaaattaaaacataaaacctgactttcattattttccttgagcagttgtaacagcttgcacactaaagatgttatctgagatggatgcaggccttccccagagacgtggccctgggctgccttagacagtaaatccttgttctgagtaaccaggagttaaaaattgggaagcatttagtcaagtgaaagaaagtactaacccaagaaggcagatatatttctgctgggcttctctgaagtactaaatgattcttttatttattccttaattttaacatttaatgacaacctaacatgtactagatagtagagatcaaggtggatgcatggagacagcaaccttccagtttaaattgaggactgaggagacggccgataggccccctactaagaagtaattctaaagtctgggaaagaaggagttcaaggatgttcacaaaaaaatgtgtttgtataagcatgacttgggataatgaaggggtaatgaagatgtgctttagtgcatgggagaccaggtaattacccccaaataattccagagtcaattggtacggtgaatgcagagatgttttaaaatcttcaacaaacgttttctataaaaggtcagcaaaatcaaaaacaagagccttatagttaagtagggtctaaagctaaagttagttgtacaagtggcggtcagatgtcaacagtaggagctcattagtttcaaccacaagacagacaagtcagaaagagcagtatggtaggagtgagcatgccctgaggtatgcctatctgcatatttgttctagacaaagacactgccacgcgttttggtatataaggaatatattgtttcagattataaaataatacatgttcctttgctaaaatttgctgaactctgaagactatggactctcgacacccagaggtggtcattgtttgtaattataaggcttctcttccttcaggtgcatactgttttacaatggtagagcatgccttatagaataagttggtcacttttctcacttaacataaccagtggtttcttacgtacataatagaatttcagtctctatgcaagaaagtttcattttttagcctatgaaggcatttttctctctttccaatatctctgaaaatctcatagtttgtgatcttaatcagtcaaccttcagctaaccaattcacatcaaagaaaaatatcgggatcaaaaaacttttcactttaaaattaagttttcggataaaagcaagggggagaaggcaaaaaaaagaaactgtacttttttacttttacctttggcttgatatccttgtttctcactgaacctatgtttgcagcagctgcagctctgcctagagtaactcatcaatggtgtgaatcttatggtgtcctacgacttttcagatctttgccactcaaactccaaacccatccaaatataagaaaataaacaaaatatttatttgaaaatcaaaatgtattaaatatatatgcatttcatacgtataatattcgggcagctgtgtattgagttccatatgcaatctttgtcttctattaatttaaaaactatatttttcagttgtggatgttaaaggataagtctcaccagtaagccttgttgctaatgaactattattgactcctacctatgcttgctaatggcatgtgccaagctcttaggcaccatttaaagaataatcaccctaaactcataatttgttgccttcagcctagatggtttatacatagaatccagccagtgtcagatactttgtattgtattattattaataataattttggcaataatattaatataatacattcaattggcctctttgggaaatggtgtttgtattcttttaaacaacacaggtattaaaaaagatagctggaacaacaagaacatggaaacttagtccaatttttgggcaggtctataagaactttaatgaactcatcttcttgacagtttatggtttaactgcctagatctacctttgagaaaagtaatattcccctgtgctattcaagagcatagatgaattttgggttggcaaaaccttcattaaaattttatgtaaccattctctagagcttgaaacttgcataataccttacccaatgaattatgcatgtcagtttctatactcaccctatttttatgtttagcctttaagcatatttatagcgggattctcataaactcattacactgtaaatatattaaaagaagtagattgtgtccttgattgaaaataacaaaaaagtcctgaggagggtcatatttacatgcattagtatgtaaccaaaatctcccaatggtgactcaccatcaaaagtcaatgacataatcaaaagatttactgaaatctccagtatatatagcccccaaacactgtaaattagtttaggatctatggactaaattcataaagtttaaacattgcacgtatgaaataggaaagcagtcttagatcttcagaaccagaatcaagaaattcaaggtaagagtttactgaagacaaagtcccttttatgtttgtacattcttttctcactaagtttatgtaatgctgttttgggaagctcacgaccactgctaggttcagccattggctataaaaactcacaagaatcagcatgagatttattacagcagaaagtaaaaaatacaaagtaaatttatcaaagagtaaaggtgcaaggagagaagtccagagaaaccagacacaagcttccaagagtctttttccagtggagtcacacgtagaatgtacagcacttaatttatccagcattaaatagtgataacacatgtgaagtgttgtctaccaggaaagcttatttgagactcagtgccaaggtgtttattggaggcaattcatgcacataacttctgcctagcacgtaccaaaattccaaattcccagagggaaagctggtgttcagcataaaccacactgtacagttcaggcatagtgagccactagtctcaatttctagaaatggtgagaagtttcctggaatccaagttcctagatactagccaagggccaatcttataagcaggacttttgatgttgctcttttctgctgctaccttaggtataacttcttcgaaattatttgtatatctgccatatcacttaaaatgattttcatcttgataatgcaagttatgtgtccaaaggcagaattaggaagagatacactgatatagatttaatacatgtaagtaaccttaagagtagactggtaaaaggtagtaaaatagttagaagtgatatgttttgagtattacctttgtttttatttttattgattttttaatatggcttttttgacaactggcttgcaaaatctctgaaaacttatccttcagtgttagctggctttggcacagcccaagaatgcaagtatgtatcagtcctctgttctcatcctgtctactaatattctattgacttctctccaagtcaaagatggggaagtatacttctatggaggtaagcgagcaggatggaaggtttgctcaaaatacttctaaactacgacaccatctcctattctgagtatcattttagagttttcatctgctttgccttatttcattctaatttaactttatacataaagaaattatgttcttggttttatcttttaaccagtatcattcacgcaggggtaaaatgtaaacaagaggcagggagggagatagtttttagggttgtttttgttgttgttgttatttgctttttttaggtcccccaattttaaactcaatgcaatgtttctcagcagagaataaagtgaacattgccaagaggcctgtagtctctcactggatttttagtttacagattctttgtagcttctttccaagatttttatttgaggcttcttcaatgcatgatgaggcttgaaacaatagaatttccaagtctctacttcgtgaagtttgctgccaacttacaaatgccttgtagcctctaaagactcagctgtgtaaaagtacttaaaaactggcccattttaagcaccctatttgatgatcattactttattttcttggagaaatgtagcccacccttatgccctactgcacttgagaagcccttaagaaataacattaagtccacaccggtaatgaagtaaaagcagggggtgacatgtcgacagagtaatccttgtgtgatttacattcagttccttaccatgaacataatctttaacctatcttaaaaaatagactaattgccacacagtgtatctccctaagattgtagaggataaagaaataaggggccactgtcctttactgctggaaaatgtcttcaggagacatttcattagaaaacactttggggcttacagagaaccaatgacaccatcaacaccacttctccctctgatctagtcttcttgtcttcaggtaattttcatatatgctttatcttccagactggattataaggcccttcaggacagtaattttatcttctctgcccattatatcattttagatgcttttaaagctattgtacctgttatggggaagaatagggacagaaaaacaggaataatagccacagtgtacacttcattggtgacattaattaaattgtgtttctcagtcagggatacatgtcctcatgaagcatttattaaatccaaaattattgcatgtcaacaaatgctccacgggttttagtgtagagtagcttttagaatcttgccctagacaccactgccaccaccactgcttatttagcccctttaacctcaccacaccttctgtttattgtttcacagtttattcttcctacatgctggatactctgtctagggttgccatcttcagcctgctgatacttcaaatctcagtttcatgatgacttcacttagaaaatagttattgatcccacagcctgggttagagacatctttttctaccatatgctatgactttgtctaccttaacatttaccagtcggtgattactgatcaatttgcatgcttctgctaaattgtaagccccttaaggacaggagccctactgtacctggctttttgtatccaacacctgtctggggtctagaacaagataggcccccatctacacttattctgtaaattaatggacatgtaaaaagatgcaaagagatatttcttcactggagattgtcactgtcagtaatatattggcattctaggcatgctggcaatcatctggactctgaatcccagttgaaatctgaagaaaataagcaataactaacataaagtttcacgttttttgacatgttgtctttcagtacagctaactctgactaaaattttcaaaggataattccataaattcataaatctctaagggaaactccaaaaatactctgtctgaaatagatagccattaatattaaaatcttaaattaagataaattattctattcatagcttttctgattgttaaaatttaccaattctctctgtctccctcttaataaatgatagttttttactgttgttgtcatcactatatctttctcaaatgttccacattgactaaggacattcttctaggtttctttttcatctctctatctttgacaaaatagttattttaattgaggtcaagtaagatacagatcatgtaaacttgcattttgaattctgtcttctgcatctacttttgaatattccacaggaatatggttgcttaatgttccacatcttaaatttatcatcttatgtagagtttcaaagagattccattaccaaggaattacaaggtgccagatattgtgctaggctttttttctagtaaaagaagcataaaatgaaagaatatttggaaatacagctagagtaatttattcaagtaggtccttgatgagttgaatgaatgataagtctatgaataaatggacttagaaatttcagattaatgactttttggagtaactgcattaaaaaaaaaacctgatgtgaaattattcaaattgtccatattgaataatagcattccatgaattgattgatgcctaaatgttgagctccaaaagtttttcaaaattttattttaataaaaaataaatattgatactagtatacatttgagtcattaatcttattttttaaagttgtttccacattcattgtttaaaatccattatcctccatatatcagaggtagtcttcaactaagtgaacttatctaagctggaactgtttcctagaaattccttctctatttgattccaggttacgattggttcatgcgaaattagcatgagcctttttatggctaaagtgcagcagaaccccttatacactgaaggtcagaatggggaaccatacactattgcagcttacagagaataagttctccactgttggtttgctttctagggatagtgcagcaactgtccctgtagctcctcacattccaagatatcccatttaacttttaggaacctaggataggctcatgtgtacctctacagccaagggtactagcttctgttcatcaccaccagtatctgcaggggagaccatgaagacaaatgaggctttgagtttatcctcacaccaatcagtttgtcctcacacttctgtggctcatgtacaccatttcttcctgtgactgattttcttgacctttagaaacgtcagaccctccattagacaaagatgcaacagctttccctaaatttcttcaccagttcgcacaattgcataagggctaatctccacaataaatctcttatttcatattgatgataatagttctgattatttgaatgaatcctaaccattacatcccacatcagaccttatgtaggtcttacatatgaccttggcagcacgggtagattaccactgctgtgatgtgattacactgattcaaagatgctataatattttatattctgtagtgctgaaattgagaattaccaaatctagcatgagcagtgaaattagaggcattttattactgcaatatttatttatagctacctatttatatggtagctaaaagaactcctagaaaaaaatagactctacaattatttctgagaattttaatacttattaattggtagaacaaatagaaaatcagtaaagttatagaaaacgtgagtaacaatattaaccaaattattttaccaacctaaaagacaattatggaacagtccatccaacagtaaaatacacattctttttaaggccacacaaaacattcacaaagatagactggattttaagctataaaacgagtctcaaacatttataaatagttgtaataattgtagcagtggtggatttacacaagtaatgtgaatggctgaagccaaaatttttgtgtgactttaaattcatttttctttcacaaaaaaaaaaataaaaattgtgtgtataagtgtgtgcatatgtgtcatgaggaggaggtggtgagaaacactggctgggtttctggtatgagttacttctgttcaaataacaaattcagttacaaaaatagctatggcttctaagtccatatcttgtaagagctcatactttgtcagagataaagactcaataaatatacatatcagtatatacacatacacacatatatgctgatatacatgtgtatatatatgcagacacatacgtgtgtgttatatatgtatgtatgtgtataatacataagacaaatatagattaccatgggagaatatacaaggaagtattcaattactagtgtcagtggtggaaattaataacaaaagccttcacagaagtacagctttaagatatgaataggagctcatcaaaaagataagaagaaagaaattttaagcatgaagttcatcatatgtaacaggaaggggctcaaagacatatttgagaacagctaaaaatttagggtgattagaagccgtggaagaggaacagttaaaggtatagctggatagatatttggaggctaacttgtgaagggccttagattatatgtagagaagttgagatttttttatcatgaaggatatggagcccacaaaattgtttttatatgtttgatatttactaacagatgcgttgttttaatatgacaattggtaataatgtacgaaatggtttgggacagggaaagaattacagtcagaggttagctgagacaccacaggaggatgtcgtgatctacagacaagcaacgtcagtaccacctgggagctcctgagaaaggcagaacgtcaggccccaccaaaatgttaatgtgcacatgaaccacctggaaattttgctcaattcagagaccaatttagcagtgttggtgtgggaaccaagattcatcattcttacacaacttctgtgtgaggtctcagtggtgatctatagtgttcactttcagtaataagggcaaggtagtaggagttgaagatggttagcaggcattgtgaaacaattaaaataatattacaaaacagaagtgccaggaattacagtcatcaaccattcaaggtgactggatagaaatgattgataaaatttgtattcataatttgaacaagatgggagtgttatgtgaatgtaaaatatgttaataaataatacttccattacaaaagtaatacataattgctattgaaagtctgcacaacacagtaatgtggaaaggaataaaaccaagtacacatattttcaaacctccaaaagctccactattcacaattttctcattctagtcattttttaccccctattgtagaatcttataaactacaaaaaggagcttaaacttgaactgaatggtaatcaaatataacttagatttatggagctggagcaataaagcaaagtttatattgtattatacattccagatatcagaaatactttgttttgctttcctgaaatgtctcctttgtccctgaaggagttggttatcctgtgccgcaggtcacataaataatgtgatgctgtctggcatggtgtctcacgcctgtaatcccagcactttgggaggctgaggtgagtgtatcacctgaggtcaggagttcgagaccagcctggccatcacggtgaaaccctgtctctactaaaaatacaaaaattagctgggtgtgggcacacacctgtaatcccagctacttgggaggctgaggcaggagaatagcttgaacctgggaggtggaggttgcagggagccgagattgcaccactgcactccagcctgggtgacagagagactctgtctccaaaaaaaattaataataataataataataataatagtgtgatgcttcagtctgtctggagccattcaggaagcaagaatattctatcatccccactggacttctacaaaaaacatcatggtacagttaacaagagcactgatgatctgtttagggccagaggttgaagagcgtggtttgttgttatttccgagactgacatacttgtggatcgagcccagcttgacagaacagatgatgaatttttcaattagctgttgtaaaagaaataaacaaacaaacaaaacaacttacttgcctgcatgcttaccttgtagtctttatgatttaggaaataaactagttttttactcctgaaaagcgttttttgctttactttctttcttttttttaaaaaaattggcagcagtttttgaggttagtaagcatgagagagaacacagagagggaactgaataaactcctgacaatatccatattcttacataatgaaaattgagcttcaaaatttttcccaccttaaccataattcaacttctcaatgatctccagtgaataaaaaccaaaaatgaaagataatggagaaattccacatacgtaatattcaacttctctcccaaccaattcctgcccagcagcttttaaactgaaggagaacagcagagaggagatagccacacttccaccaagcagatgcagatctgttccctaaactcctttctgtctgctcaggaagggtatctctagtcacactatgaagttacaactatctccactcctcgtaatctagccctcttgtctactttatgctatcctcttctattttacttttacatatgtaatttgcctttcgtccttccttcccccaaacccaaagaatgtatcttccaagacagcaagaattttatcatctgtttttcaaaaggcacaatgtttagaagagcatctaatgcattgtaggtgcttagtaaatctttttgaattaataagtctcatttttaatcaattaaaatatgagtgatgtattaaatttgccatgatgtaatgacataaatgtttacagatctatacatttatttaacgtttgtatatagatgattatgcaatctgcaaataaaattagaagctaaaactaaaaactcattcacttcgtcttttccaatatatgtttttatttctgttcttgccttattgcactgactagatcttttagtacaatactgaataaatggtagaaagagattcccagacttactctaactcttaggcaaagcatccagtctgtcaccaataagtaagatgacagctgtaagtttttcatagataaacttcaatcagattgaagaagtatcctgtatacctagtttccggaaagatatcgtgagaaatggatgctggattttgacaatgcgttttgtgggtgtttatttaaatgataatttttaacttcttactaaggtgaattacattattgatttatgtatgctaaactaactttgcacttttgagataaacgtcattttgtcatgatgtaatactcattttgcatcttgttggttttgattaactaaaattttgtttagatatttttcaccagtatttataagacatatcagttttccatttcttttgttaataggtttctgtctggtgagatggcctctttaaatgagttggaaaaatatttcctgctttttaacattctggtaaaatcttattgctatgtaacctttatttcctattgtccttatgttccttttgtactttttctaattgtatttttgtggagagccaagttttttgtgcgtatatattactatttcatgtttttttcttcttttctcttttcttttctttctttctttctttttttttttttttttttttttagtaaggatctccctctgtcacccaggctggagtgcagtagtgagaccatggctcactgcagcctcgacattcccttgattcaagtgattctcatatttcagcctccagagtagctgggactacaggcaggtgccatcacacctggctaatttctcttttattttttatagaaaaagggtttcatcatgttgccctggcaggtctcaaattcctaggatcaagctatgctccctcctgggcctcccaaagttcaggaattacaggcatgagccactacccctggcctatttttaaataagatgattttttcccaaataagtggtatttgtgaatatattgtattaaggaagagccaagacaatatccccccctagtgaaaagtctttctggctcacaaacaaattcttttttgattcaggggctcctgcataagtattagacaggttactcaatgtttcctttgacaaaggtgagtagctatacgtagggttgccagatttatcaaataaaaatacacaaaacccagttatatttgaatttcagataaacaacaaacagcattttggtatgcatatgtctcatgcaatattttgaatgtacttacgttgaaacaagtgtaaatctaaatttgaaattcaaatgtaactggaaattctgtattttttctgacaaccctatctgcagtgccactttccactcacaaagtttctatgtgacgtgtgtgacacatttgcccagataacatgtgtaaaggtcttcctccgaggccatttatccttcagcatgacctcccttggctgactgtggggtcaaacagggaacaggagcctccacacctgggtaactcacactgggcctgcataagcaccgagggaccctgcctttatgtactacccactttggagatctctgttcccttgaacaagtgccatctttgtggctcccttcatcactttaaatgtttcattgtactgctttctttgttttccccagtcttttactacagtttgctacactttatgcttcgtgtagattttgttttcgagtgttttctattaccattgaagatgaaatttcaatctatttttgcttttttctttctttttgctttcagaactgagaaggggaatgttcactctgcgaacttacacctgcaggtctatataatccattgaatagcttcatcagtatctatttattttacgcttctttcctatttctattttagtatctttgtatttccccctttttatattatagttgttaaagacatatctgttgttttgcaatgttccaggttttagaaatatttgtatgttttcctgtacactgttgaaccctgactcctcaccactttacatttaatgacttctgatattttatcttcattattttctccataaattcagttccgttaggttaggtttttttttttttttgatcttttaaatttcaatgcttactttatttttaattcattttcttaaatagctaaatatttaacactaacaagtgcccatgagaaatgatctatattctattcatttggaggtactgtcttattattattcccttttcaaagtatcttattacagtttgaatttgtgtttaacaaaataatgatatagtagcattttccacattatagtctatgcaactaaatatttttaactgaaatattcttataatatagcttgcttatttagcttttgcattgtgctcaaagaatatgagctattaaataattttgaaattgttagctttactttttggtaggaaaacagtgagagggtagttttaatataatattgttgaaaaaaatgagcatacatttttccctcaattatctgcccttttgtggaacacaattttcctacagtttaaaaggcagtcatgtagtgtttactacctgatgtgccgcacccagcatatcctacatttcaatagatggacatctcaatcaacgtgaactaattaatggataaaagaaaatcagtaatatttgtatctttggtaattttaaattgggatatgaagtaactatgccagtgagctatggcttctgtaaatgaaaggtaaaatataataaggaagaatttggggcaatctctatgaggattgtgaataatcaaccatacaagaatttaatatcctcaaacaatatccatgttttagtgcttgattctttagggtcagcagattaggtgcttcttggtttggcttgactccctcataaaactttaatgagtcgtgagtcagataggcagttcgctttctgggatggctggctatccactggatcatcttgcttctcattccttcatcttatttctgagtgtcgcttagatccttccaggagcctaccttggcatgttctcatggccaggcttcaatgtaaatgcaaggcagtctaaagatataagaagacatgctaagcaggcaaatgcttttgacccttaggctcagaactcatacacagtcatatctgctatgttccattagccaaaacaggttgaaagaccatctgagtcagggtatggatggagaatacaaagtttcacatcaaatcatgtagatattgggaaaccattaattcacaacataacagcaagttactacagccttctctccagaaccaataatcaatatcctttttatatgaagaaaatgacttgggaatttatccttagtgtcaattacagtaacttggaaagtttatggacattatttgttggaatgtgtgtgtgctccattttcattgtactttccttctgaggattcaattacatacatgtgagactatttgatttcccacagaccttagactttctgttctattttttcatattttttcttttagctgttatttgatagtttgtattgctctgtattcaaattctgtaattattttatatgcttagtgatatggtttggctgtgtccccacccaaatctcatcctgaattgtaatcctcatcatccccgcatatcgtcatgggagggaccccatgagaggtaattgaatcatgggggtggtttccccaatcctattctcatgatagtgtttgagttttcataacatctgatggttttataagtgtttggcatttttcctgcttgcactcactccatcctgctgccctgtgaagaaggcacctactttccctttgccttccaccatgtgtaagtttcctgaggtcctccgagcaatgctgaactgtgagtaaattaaacttcttttctttataaattactgaagtttccatgtctctgctaaaatttttcatatatttatatatgttgtacacattttgaactaggtactttggcatttttatcagttactttaaataatattatagttttataattataataataattctaatctttgaggcatctctgtatctacttctatcaactgtgttctctgttgacttagtgctcaccttgttttctctctctctcacacacactttctctctttttcctttttatgtgttttatcaatttattatatgctgatcatttgtgtaatagtataggcaaaaataaattatatttacacttagaataaagaatatggcattttgtaataggctgctataactgggagcccattaaatctgatccgtattgatgtaggcctgggatttgtagcatgcattgttagagtggctttaatttctctcagttcattactggttttatatatttagagattgagctcaggtatctctgttctgtgaagcttcacctctgagaacttgtgaggttctagagacacctttgtgctttatagctgagctatcagctttccaatttgtggaatacttctctctgccttctaccaagacaaatgggtttttcagtttctgggaaattttatttggtctcaaagcctccttcaaactttccaaactaggaaaaagtagttttagctctagtccttgccaggttaatttcagtgtgcctatttcagtgtggttggatttattatctcaggaatccagctctgtccacatcttcagaaaggcagtttctttgtagttgtgggaggccatgaaaacctggagatatcttttttagctttcctgttctgcatcccagcctgtgtaatattaccccaatgcaattggtgaagactcatggaataatcagtgaatgagtctagaattgttttatgtatgaagttccatggaattctaatttgtcatataagccatgatgaggttcttaaaagtatttcatcatttccccttgtttctttctactcccattaatagcaaatagcaaattattcatgctctgatcattctatcaaaggtacatccaaattctcgcttgaaaaaagactcaactttctagaatttagatcatcgtttatttgcatatagcactttctgagagtctcagaaaaacaatggttttgtagtatattttgcttgttttagtttttatggaaaaagaaacattctcttgtgatgttgcacatcctagtaagaagttatgtcttgcactttattttcaaatattattccaaattagcatatactgctttatttataataatagagtaagtaaatagggtaaaaataatcaggtgttcccccttcctcaaaggaatataacattaaatgttaggccttaaaagaaatggcactttctttatattaagagatagtttacttgttgaacacaaatgtattctattattttgcctctttttactttgataagtgccaaatttacaataaaattctgggtttatcctcctcgatgatgtttgaaactctaaagaaacaacagtgtgtaaaaacacaacggccgaaagaggatattttcacctccatatacataattaacttggagaatcaactgagagttgcaggtatttagtaatgtgtgatgtgttgtatttcaacaaataaattttctagcattttaaagactagatcaatcagtgcaaattaaaaaaaagcaaaccaaccaacaaaaataacaatatattatgcattaaatttgtaatttagagataacttagatttatatttgtatctacataagcacacatctctatttcatatttctggaagaaataataggctcatacaacttagaaaagttgctatgatgtcgagggaattgaatgattaatgcagaatcaataccactaccaaagagtgtacctgatttatcttacaatcaacatggaaagatcattttaactttatgactcagcagctgtcaagatgtaaacctctcacaaaattatttcaaggcaggagttaacttgcttactctgcagaaacacgtaagagacaaaacgttggtagacgtttgaccaaggatgtgcttcaaatgtatcaggtttgctttgtcattctctttccccaataattttcttcagccattgttgcagagcacaaacaatgcagtcagcaacaaatttgacagaatatagtgacccagagaaatcaggtaaagtgtgaaatggctaagtgaaatcattttaccaaaatttgcctggaatggctctaagctgccaagttaggtaggagagtattacagctacttgaaatttaaaactacatagttgtctatattaaagagaatccctcaagactttgactatcaaagtaccccccaccagaaatagcctttatccaccacaaaaatcttaatcccataaacaatgagaacttactgaagtgtgtcaacagattagttcagatacagctgagaacattctaatgtaactaacctaaaatctccaagcagaggcaaattgcccagcgttctggaaaactaactatggcctccagtaaacattttttttttcagaaacacgatcccataaaatttgaccctgttgcaataaacatctcttgcatcttgtttgacataattatctgcaaatcttccccatatgaattcacatacgcgctctctcttttcaccataatctccacatggacagtcccttttcatccttcaggttgagtataaatgccaccttttctgagaagcctttctccattaccttatcgagaaagttttgccctgcttattctccatctcagcttcttgtttgtttccttcaaggctcatgtctgaatatgttacttaaaaaaatgtgtctttatgactttttcctgccacaactataagtagatgtaggcaaatcctacctcttgcatgttccatatttagcaagtaagacattgccaggcacagaggagatgctcaattaatatttctcacatacataagtacattaaaatatatatatttcatggagtatcctttgatcctttattgtagaattaccctttctttcttattttttttttccttttttgagacggagtcttgctctgttgcccaggctggagtgcagtggcacgatctcggctcactgcaagcttcgcctcctgggttcacgccattctcctgcctcagcctcccaagtagctgggactacaggcacccgccaccacacccggctaattttttgtactttttagtagagacggggcttcaccatgttagccaggatggtctcgatctcctgacctcgtgatctgccacctcggcctcccaaagtgcagggattacaggcgtgagccaattaagtctcttctctaagtaataataaaattgctgggccctgattgcaaggaaaagaaacccaacacaaattaaaactagaagagatattaacacatgcaataaacacccacggactaaccttcagaaatggcagaaacaagtatttaaaatagcatcaggataccagaattactgcttttctcttcaactttcagttctgcttcccattgagtcatcttattttcaggaaaattttttataggtagaaaatatggtttctagcagatctagacttacattcaatcagcttagcaacaatagaaagaaaccatgttccctgctaccagagtaaatgacccactaggggctctaattagtctgacttaaattagtctgtgagtctaagtggatgaagacattgattgatctaatctgattcattgtctaatcctaacatccaacaccactccctgaaaacatcttgggataaatttttagcacttgaaagtactagcaagagaaaaagtatagctaatctgatccaccacacatttttcttgttgcataccatttattaaagtgtcagacatgcatgcccatcaccacagactgctagctctttgcttagcatgcctgaaggttttttgttgtcattaaagagtcccttgtttaccaccttctcacaataaatgtcttatgaatgaattcataaatcagtattttttctgacttatttggcagaaaaattggctgaatattcttattagatttagagtttaacgttgtcttatgagaatcattcttttgctgggtggaaggtgggctgagtgatggtacagagagacacttttatggtcattgactttaatttcagactaagatattcccaaacagaatttgatcacataattacgtccttaaaaataggatcagtataaggaaaccacagtgaaatacttttgaaaatataaaaataagctgctaccatctggaatattatttacaagtttttggccctatacttcctatttttaaataaaagaaaaacaaagcaaaacaattatgctctgagctctaagtagatactgataggctttcatctatgaggcaaaatttaagggcattactatcatctatagatttctttatatctgcagtacctgttaaggcaataaatcattaatttgtataaaacacacacacgcatattattcagaaggccaataaatagtcaaatcatatgcaattttgagtgtgtccgaaattctgttaccattcttactactagttataattttctaagccttcagaatgaaacaagcatcaaaaccctcataggatctttgttattaaaaaaactactaaatcagcaattctcaattacttataatttttgctttctttattaaatactacaaagggtacaatattcaaaactagttaattatatgcttcagaaatgcctatttacttcccaaatgtttcttgtgagagatgcttaatgtagttatgtgcaggaatctagaactgagatatttcagcaaagctatgattgtgatgtccaggtcttatcacttaattactataattactaagtcaattttccaaccattttaaaataattttttataacaagttgaaacaaaattcacaagaatgtataaagactttttaaattaaaatgttatacaacagcaaagggagccctcatgctctaccagctatcaaaatatacttcaaacataaatgttatattttggtcacttctttcaatcatttaatttttctattcttttgccattttatcactttctctatcccaaagtgaggcatccatattgttggactgattaaaatggccccaagtcaaccagtaatctgttgtgttattggtattagtatattctggtatttagttttgtgacagaaagcctgggggtgtagagctctcaggcagctgaaagggaagtgagtctataatgaagttaacacaaagaacagggtagcattaaggtgagaaattgggccagtccctaatcattccatcaaaacaataaatctcttattctttaagccattttgaattggattttctataatttaaaacaaagcacatagatatatctgatgaatagggcttataaaaatttaagcaatgtggtctaggtaaaatcatcttttaaaaaatagttgagaagagtagaacagaccccagaaatcagcccaagaaaccataaaggaactttaaaaaggaaagagaagtccttgcctatgcctatgtcctgaatggcatttcttaggttttcttctagggtttttatggttttaggtctaacatttaagtctttaatccatcttgaattaatttttgtataaggtgtaaggaagggatccagttttagctttctacatatggctagccagttttcccagcaccatttattaaatagggaatcttttccccagttcttgtttttgtcaggtttgtcaaagatcagatggtggcagatgtgtggtgttattcctgaggcctctgttctgttccattggtctatatctctgttttggtaccagaaccatgctgttttgattactgtagccttgtagtatagtttgaagtcaggtagcatgatgtctccagcttttttctttttgcttagggttgtcttggcaatgtgggctcttttttggttccatatgaactttaaagtagtttttttccaattctgtgaagaaagtcattggtagattgatggggatgacattgaatatataaattatcttgggcactaaggccattttgacaataaggatgcttcctatccatgagcatggaatgttcttccatttgtttgtgtcctcttttatttcattgagcagtggtttgtagttctccttgaagaggtccttcatatcccttgtaagttggattcctaggtattttattctctgtgtagcaattgtgaatgggagttcactcacaatttggctcactgtttgtctgttattggtgtataggaatgcttgtgatttttgcatattgattttgtatcctgagactttgctgaagttgcttatcagcttaaggagattttggtctgagacgatggagttttctaaataatacaatcatgtcatctgcaaacagggacaatttgacttcctcttttcctaattgaataccctttatttctttctcttccctgattgccctggccagaacttccaacattatattgtataggtgtggtgagatagggcatccctgtcttgtgccagttttcaaagggaatgctcccagtttttgcccattcagtatgatattggctgtgggtttgtcataaatagctcttactattttgagatacgttccatcaatacctagtttattgagagtttttagcatgaagggctgttgaattttgtcaaaggccttttctgcatctattgagataatcatgtggtttttgtcattggttctgtttatgtgatggattatgtttattgatttgcatgtgttgaaccagccttgcatcccagggatgaagctgacttgattgtggtgggtaagctttttgatgtgctgctggattcggtttgccagtattttattgaggattttcgcatcgatgttcatcagggatattagtgtaaaattctcgttttttgctgtgtctctgtcaggctttgatattaggatgatgctggcctcataaaataagttagggaggattcaatggcaacaaaagccaaaatagacaaatgggatctagttaaactaaagagcttctgcacagcaaaggaaactaccatcagagtgaacagacaacctacagaatgggagaaaattattgcaatctacccatctgacaaagggctaatatccagaatctacaaagaactcaaacatatttacaagaaaaaagcaaacaatcccatcaacaagtgggcacaggatatgaacagacacttctcaaaagaagacatttatgcagccaaaagacacatgaaaaaatgctcatcatcactggccatcagagaaatgcaaatcaaaaccacaatgagataccatctcacatcagttagaatggcgatcattaaaaagtcaggaaacaacagatgctggagaggatgtggagaaataggaaggcttttacactgttggtgggagtgtaaactagttcaaccattgcggaagacagtgtggcaattcctcaaggatctagaactagaaataccatttgacccagagatcccattactgggtatgtacccaaaggattataaatcatgctactataaagacgcatgcacacatatgtttattgcggcactattcacaatagcaaagacttggaatcaacccaaatgtccatcaatgatagactggattaagaaaatgtggcacatatacactatggaatattatgcagccataaaaaaggatgagttcatgtcctttgcagggacatggatgaagctggaaaccatcattccgaccaaactattgcaaggacagaaaagcaaacaccacatgttctcactcataggtgggaattgaacaatgagaacacttggtaacagggcggggaacatcacacactggggcctgtcatgggctgggggacaggaggaatagcattaggagaaatgcctaatgtaaatgacgagctaattggtgcagcaaaccaacatggcacatgtatacctaggtaacaaacctgcacgttgtgcacatgtaccctagaacttaaaggataataaaaataaataaataaataaataaataaataaataacatagagacaaaagtgaatagaaattcacttaagaagaatgggatataaaatattcaagggctaatattttctattgtataaaatatttcatagcatcaataaaggtagaacatttaaaatatattctgcaatggtagtataatgctaatttcaaaataagaaaattatgacctggaaaatttatgaaggtaatgcagtttaattatacattgcaaatttgaagaataacatatgcaaaaaatgcagatatatatgtatatatatatatatatatacacacacatatataaaaatatgccattattaagctagaatttattttagaaaatggaggatagtttgaaatttgacaatctattactttgatttactgtgttagtacatttagaagaaaaatataagatcataattcagaaattactactgaatgaatttgctagaaattaaagaaatataaaacaaaaataaaagaaaattttatttaaccaagaaacataatagtgtttagcaatattcaccaatgtttgaagaatctattcaatataataagaattaagaaataaaaattataaatattgaaaagggaaatattatttattattaaaatagcataaaagcatataatgatatcccaggagaacaaatatttttacaactagtaaaacaacttgaaaaatatccagttacaagataagtatttcaaagtaattctttttcatgtgcaaatgctaaactaaacaaaatattcctatattgtatagcagtataaaaatgaagaaaaataattttggctaaacatgaacagaaataggggaactctctttcatattattgaatggaaagagtcagtattctcccaaatttatttatgaattaaattctcttgtagtaaaaaaagcagcatttttaaaaagaatttatatttgttaagctgatgtcatttagaatagtaatggtgtaagtttactgaactatgttgggagaagaaaaggaaaattttgtagtgagatttttagcagatacaatggtataaaaatatatatatttttttaatacaggaaaaggctgggcatggtggctcatgcttgtaattgcagcactttggaatgcggaggcaggcagagcacttgaggtcaggagttcgagaccagcctggccaacatgggggaaactcatctctactaaaaatacaaaaattagcctgtcttggtggtgggtgcctgtaatcccagctactgggtaggctgaggcaggagaattgctttaaccccaaaggcaaatgttgtagtgagccgagattgtgccactgcattccaacctgggtgacagagagaggctctgtctcaaaaataaataaaaataaataaatacagataaaggtacatatatacctatatcagtcaaataaacttactatacatatgtgtgtatgtatgtatatacacacatatataaaaagtatattgtaaaataataatttcaatattttaataaatagagccttcaataaatggaacagggtcagttgggtatttagagaggtttgatgtacaaaaatacaaatgtattcaacatcaaaatataaatatataaaattattaatgtatgtgaagataaatagaaaagttggtctttattatctagaactgtggaaggttttgtttattatgacaagaataaaaatcatttaaaaattaccaagtgtgaacagaaaaaaatatatatatataaattcaatataatttgtacacaaaaattaaagtaagtaacaaaagactaaaggtccaatagggtaaaattataaaaacaaacaaaggtcaatatttcccatattaaaatatcccatataaataagaaaaatgcaaataaacaaagagaaaagtagattaaagttatcgaaaggaagttcttgagaaaaggatacaaatgactctgaagaatggatataagttcataaagtccatagtgaatagaaaagttcaaactaaaacaatgggatagcatttgtagcttataagactgtaaaatacaaaatgatttacatttagcattaataaatatgtggggaacatgatattctccaacaatactaatagatataaatcagccaaagattttcaaggtctgtgtcatgtacctgttaattaattatttatttatttttgattgagcaaatccatttctttggcaaagattacaaagtaaaacatgttcaaggatgtccattatagcattacaaactacctaaacagctatcaatgcaagaatagctaaattgattttaacacaaccatttcctgaaacactatgaactatgaaaaagaataatctgtgttcatatgcactgaaaaggaaaaatatctatgattgttttcatttaaaattagagatatggtatactatacttcactgtttgtaaaaataattatgtatataaaatatttcaatgtgcatatttgatgctttggcataacaaatattaaattgttaacattttgttttagttatgtggtgagaagaaaaaggaacataacttttcacctattcatttttgtattttaacactttaagcactcatactatttttgtatttttaacgtttacttttcaaatcatgtttttgatattctaatttttaattttttcagattgtgtaattactatattatatagaagtatatatataattaatatatatatataatatatattatattatatatataataatataaataattaaggaaactaaataaattttacttcaataatattatttgtacaatatgtttatgtttgtagtagtaaatcaagtttcaaatctttgcatttgagaaatgttgcctatcaatttctgtactgtttaactagttcacttgtttattgcagtcttcaacaactgaaatttcaatctaatatgaattatatcacttaattttttaagtaatgatgcattatatgttgacttattctattttgccctcttactcaagtacctcacctcaaacgaatataaacttaaaaacactatagactaaagtacaatttagggtttttctcatactatgcatctcttagcccaattatatattaaaaaaatctgctgtatacattagctgtacaactttgagtgaattatgtgacctctttaaacctcagctttctcacctggaaaattgaactaattttcccttgcatataggttccatataggtcccttgcatataggttccattcaaaattaaatgagattattcttgcaaatgtttagatgttatcctggtgtgtcataaatggtcaatacacaaattttctaatttcatgttcttctaacatcctgttaaaaatctgatgagtcaagagcttagcaaagttttattaacaaagaaggagagagaggtaagaagagagcaaaagagaatgaaagagagaggcaaatagagaacactgagtgcaatggtcaattttttctgggattaatatatactagaactatcataattatattttaatcaataagtggtaatttttatcatcccacaaaatttgtgaagatattttccctgaggtataattgtaacaacagaaacacaggtagtatttgaaggctagcaataataaatccattttgaattttttaaaaaagttaatgttcgctacaaacctgccgagaccagctcggtcatggagaccctaacccagtggcgctagaggaattaaagacacacacacacagaaatacagagtgtggagtgggaaatcagggggctgacagccttcagagctgagagcccccaacagagtttgacgcacatatttattgacagcaagccagtgataagcattatttttatagattatagattaactaaaagtattccttacaggaaacaaagggatgggccaaaataaagggatggagtcagctagttatctgcagcaggagcatgtccttaaggtgcagatcgctcatgctattgtttgtggttcagaaacacctttaagcggttttccaccctgggtgggccaggtgttccttgccctccttccaataaaccaacaaccttcagcgtgggcatcatggtcatcacgagcatgtcacagtgctgcagagatttttgtttatggctagttttggggccagtttatggccagatttgggggtctgttcccaacacaaacctgagatgaacttggtagtcaaaatagtcattcctcattttacatttgggaaataaaatgatattctgggatatgataatttattcaagatatgctgtacacataaagtttctcatgtagtctcttgactacatatctaatcccctcatggtgctcccttcctttttctattagtctgtgccagtgtattcaatgagagtgtttctcttaagagtctgacagcacaaaatttagctattggtataaactcaaaacagctttttccattactattgcttatacataactcttaggttctctcaaagtgtatttaaacaagtcttattatccccagcccagattgggggagaatcaaactgacatctcatatgagcattttcctcttttcaaatgctgtgaaatcagttatagccatagaatgtgaatttacaacagcaataaacagggtgaagagagaagatttaaagattaggcaccctacagctgtaaagtccttattctctcaaatctgtttccacatggcataatggacatttcagggtcaaaataacaatgaaaatcacactcgtagaagttaaacttaagcctaacactgcctattgttctatagtaattagagtaaaaaacatttttagagctcacagtttggtaatacagaaacacagcaggcatgttttctgttctctatgtaagcctttcacatagatttgtggaccatgataacaaaagaaaatcctttgaaatgtagttatatttttattgacatagtgaactatccagcatccaagatgttctggcagagaattgattcccccttaatgctttttatagagccttgtttcttttcgtcagtgtgacttacagtagtacatcttgaaaagtaaataactactgagacacctctctaataaaaaaaaaggcttacaaattatgagagctgttttctttcttatacattttacttagtacatgcacgattactgaattcaacatgaacttgcatgcaactatttgataaaattcttaaatgataatattaagtatttaaaataaaaacaggtagggtctacctaagtgtgtaaaactgtcccactagtgtaggtataaacagacaattctcctaatacacatctctattactaattttcaaattttctgtatatcaatggatttaaaaaatgatcagccaacattaagcatatcttcctttactttttcttcttataagccactatatatttgacacatttgacactctttaacaataaaaatactttttttctttttttggagatggagtctctctctgttgcccaggctggagtgcggtggcacagtcttggctcactgcaaactccacctcctgacttcaagtgattctcctgtcttagcctcccgagtagctgggactacaggcgtatgccaccacagctggctaatttttgtattttgagtagagatggggtttcaccatgttggccaggctggtcttgaactcctgacctcgtgatccgcctgcctcagcctcccaaagtgctgggattacaggcatgagctactgcgcccagcaaaaaatacttttttaaaatttatcagaagaggggtccccaatctaatagaggcctgtggcctgttagaaaccaggctgcacagcaggaggtgagcacagggaaagtgagcaaagcttcatccatatttacagctgctgtcctttgtgtgcattaccgcctgaggtctcccttctagcaaatcagtggtgccattagattttcacaggagtgtgaatcctaccatgaactgcacatgtgaagaatctaagttatgcactccttatgagaatctaatgcctgacgatctgaggtggagctgaggcagtgagctggggagcagctgtaaatacagattaacattagcagagagctttgactgcacacagaccataatcaatcaattgcttgcagactcatatcaaaaccctacaatgagtggcaagtgacaagctgcatctggtcataggctttatggtggcaagtgagttgatgtacttcaactgtgcagctgcatctggtagcagggtttaagtcagaatctgacacatattttagtccatgcatggccagcccattattttatttaccactgccacttgtgcctctttcccatgctgtgcgtttgtctcagtcacagttttggtttagctcacaagctaaccctagccaaaatgagaaaaaaacaaacatccttggatagcttctttgaaaagggggaaagacgcaatgatgagacagcagaaaactctgagacggccaacaaaattaaagttgcatttaaaagaaaatatcaaaagttctgttaaaattatgggttcattgcagcaagggattcacattctccaggtctgccttgtataatacgtggcagttcaacaaagccatgaaatcttcaaaacagcttggccatatggggaccaagtatcctgcattaaaaaacaaacctttggagtttttcaaaagaaaatgaatgtgaccacgaacaacaaaagcaattattgaaggtcaccgctgcatcaaatacgtctgcactgagagcatcattcttagtggctaactgtattgctaaagttaagtcgaccattactactggtgaagagttaatcctgcctgctgctaaggatatttgtcatgaacttttaggagaggctgcagttcaaaagatggtacatcttttggctagcaccataactaaactaattggtgaaatagcagaggatattgagccacgattgttagagaggattaatgagtcactgtggtacgcaatccaggtcaatgagtctaccaatctttacaacaaggcaacaatgtttgttgttgtgcaatatgtttttcaagagaatgtccatgagtatatgttaagtccacttttgttgccagccaacaccacagctgcagaactgttcaagtctttgaattattacatgtaaggaaaactgaactggtcactttttgttggcgtattcatgatggagcagctgccatgactggatggctttttggtttcactacacaggtcaaaaggtcacttctgaatgtgagtctacccactgtgtcatccacagagaaatgctggctagccgaaaaatgtcatctgagcttaataacatttttcaggatgtgattaaaattatcaaatacattaaagtgcatgcccttaacatgtccattcatgcagctctgtgaggagatggacacagaacatacacatcttctcttatacacagaagtaagatggctttctgaaggtggatcactggccggagtttttgagttacaggaaccacctcaatgatttcttttagaaaaacagtcaccactggcctcacatttcagtgacacaaaatggatcacaaaacttgcttacctgtatgacatattcaacctgctcagcaaactcaatctatcacttcagggaagaatgacagctgtgttcaaattggcagatgaagtggctgcattcaaagccaaactggaattatggggggtgacgagtgaatactgggatttctgacgtttcaaacattagcagagattttgaaagagactgagccagggccttctttcttccagctggtgcatgatcagccatctcagctttcaaattacttcgcaaccacaaaagacacccaaactgggaaggaatggatccaggacccatttgtgaataagccaggttaatcaactttgtctatgctagaagaagatcacctgcacgagatcacaaatgctggtagctttaaaagtatgtttgagacaacttcaaatatccatgcattctaggctaaagaaaaggtgcaatatcctgagactgccacaaaagcagtgaaaagcctgcttccatttccaacaacctctatctttgtaaattaaggttctctgcagtggcagcaaccaaaaagacattatggagtagactagtcataagcacatgcttcagccgtcactgcctcccatcactccagataggaccatctagttcagaaaacaaactcagggttcccactgattctacatcatggtgagttgtataatcatttcattatatattgtaatataagaataatggaaataaagtgtgcaataaatgtaatgcacttgaatcatttcaaaaccttcccaccctcccccagtctgtggaaaaaattgtcttccacaaaactggtcagtccccagtgcgaaaaaggttggtgactgctatattagagcatgctgactaccaacctaacttcttaaaagcataaacttgaaagtttaaaaacatacaatgtatgcacacatactttcatataaatcatgtgctgagcctggttcatttatacattcaattttgacaaattgcccacctcaaatgaaaaaaaaaatgtagggtcattttaaaacttggcctggtacctctgactttgggtaacagcaataaggaactgcagccagctatttgtaaagctgttctgctgtatttctccatcctttctcctatcaattttatttccaaagccaaatgcctgacaaatgcctttcaaaatcgtacaacattttcattcattttgatttgcacaattgcacacaatgattccccctctctattagtagtaggccttattaaaaagttttttttaaaaaaaaaatcatgtgtttttgattaattttcttcaccaaaggtcagaaatggtatctgaagtgtcactttccacactgcagccatagagtacctaatacataaccatagattcaagttaataccgagattaccccaataaatatgctcaaggtcaaacgctacccacccttgatgcacaaaactagctcgattttagccaaagtctggtctgtgattggtaccttccatcagaaaccttggggaacaatgagagctattaaatacacatagatttaaaattagctgagaccaaccgtaagggtcatttacttttagaatatcaagtagtgtgagtaatagatttgcagatcctccttcaaagagctttgcataattcagaattctcttctgaatgttggcactatacactaggagtaatgcatatttttaaatttagataagttttatgtgtttctgatcctattttgagtttgttttctctgtgtcctgttaatggtagatgatgagcacacaaagatgtagattataatgatgataatgataatgatgatgacaatattaccttttctttataatattaacttatcaatcagttaattacatacatttatgcaaactatgcctcaaggtagacactaatttacccactttacagaggagtgaccttatttagagttagactaactcaaagttccaggctaacaaaattcgagatccaggttttttataccatctcaattccttttatatctttgggaagtctcacattgcaaagccaaggctcatgaaaacaatctatattcaaaatgttgaacaaaaatttatcaagtgctcatttgtgactaatactgtattaagcatgaagaagagtattgatgaaatgttagttatagccatatttttgggagttaaatgcagaatattttgttcggggaactaatgaaaacatcctataagcaacatactatgaaactatcattcatattaagagagctcagttattaaactttaagctccttgaggacagggattaagatcaaaacatcctttttgatcacatggaatatagcaagtgctctataaagctctgttgaaagaacgtatgaatgaatgacagctactgttaaatcctcactgcaaccattcctttagtacaccaatcctgatgacggtgtcttctcaatctctcttgaatgtgttcatttttcattttttctgttagtgataggctcacacaaagtaaaacaaaggcaaaaatacatcaacgaacaagtcaagtggatcctaccaataaacaaaattaactcaaaaatttatttttcaagaattcacatcaacaaaaatgggcccattctatgttttctatttctgtctacaccagaagttatgtgctgacaagtgactgcgtcaggtctatctatgaatctctgcagttttaatctaactgatcttaaatgtttaaatcagtttcctatttttaacattttcagattttgaagtacatctgaacctctggctttcttttggaaaattagaagacgtcgctttttgaaataaaattgaattgcttctgccctatctacgtggtacatgcactgtacaactcactgtactcagcactactgctcactactatccaccactcacttcatctctgatcattacggccaaaagtcacatccatgctcttaagtgcattatcatctagttgaagctaaaataaaacgtctggtccattcatttgaatttctaaccactgctcttcgggagatcctcttcaacctcaaatggatcctgatatttgctaattctgtgctctggtttgccatacattctatcatcttgtatctgtgggtttaggtaaattaacattgttgagcttcagtttcttgaactataaaatgagccaatgagcctgtctgtattttaatgttcttaggaagctttagtgggatgtttttcaataaatactgagaacatcgacggacatttagtaaatgcttaatacatattaacttactttgatcatgctgctgatggtattatgatctttatatctttcatagccacctgtaaaaaacaatcagcatgaaaatgccttgccatttctattgtagggtggagtgggaataatctggggtaagaattgaagcatgacggagtagcaagtctcactgaaatagattctgtattcccaaatatgagaccctagccccagatataaaaggcagtttctaggtaagggaagagggaaattacgtcttgatttatacagacaggggaaaaaaaaaatgaaaaggggcagaaacaggtccaagaattgtgtggtgggggggagatgaggcttgaatacttaaatattgataagaagccagacgtgacagggaacatctccaccagcacttcacagagcacttcacagaatcagtccttcagtaactgtagccagtttttttgttttttgtggagtttttgttttttgtggaggaaacaaaccacaaaagatttagcttcctagtagagtgtactctcctaggtaatgaggaaaaacttttctaacttcctcacatatccttcaacttcttacatttatatgaaatccctttaatgaaaaaatagcttacatttatttagcactatggactcattcttagcccattatgtacattaattatttagttcttacaaccctaagaggcttaacaaaggaataaaataaattgtcatgtagtaggaaaaaaaaaaaacatggttcttggagtttaaaggctggaacaaaggcaaatgcagtgatggttgagtgtcagcgatgatcaaaacacatttattagccacacttggaaggttctggcatattatttgatattgggaaagaggtgttgaagaatatgaagctgaagatgattctatgatttttagttgagatgtgttaatgcgtgtacatgtcattaaccaatttctatggaatagagtaaactcagtaggaaaagtagggttatgaaaatattatattaattcagacatgaatacattgaatttaaagtacttatagggacaatgaaatgcaaatacccaatattgcttttagtggttgacttctgatgtaaaaatagtttcttagtataaatattggtttaaggtttttacatgccgactttaagaaccaccagactttctgttctcatggtaattgagtgaccttgggaaagttagctaattgaataacagtcattataatgcatcctaattacgttattttaagaataaggtagcatgatgatggcctagataattgttatttcgatgtgtgattattttaaaaatcatgagagatatattgtaaaaatagtctccaaacaggtactagaaaacagtactgaaattataagacacatgtaagaaaaaactaggtattttgtgtgtaaccttaaaacacaaatattcaatattatttcttacattatattatttgacccctattgctctcaactcttgttttatattaaaatcacagaaaagattttttttgtaagtcatatccactccccatcccaggtttattaagccaaaatttctgggagtgattgaaaggtgctgtcagtggcacagcccatgttattagccagtttcagatcccacaaacaaaaagcagttcatgaagttgcctgtatgcctatactgtttcctttttattagtaataggctttatataatttgtataccaaaatttgtacctagtgactctctgttattttatgcctcctattagagaacaagattattcttaaaaagtaaggcttagttttttgatatttgaatctgatttctatttccaagcctactttcccaattttaaggaaacatagaactttatctctgcctaatatgaaacatccttaaaacatgcctcttttccatcttggctcaatcaatcacttttaataaaacgccgatgcgggcaaagaccttcccagaaatacactgaatagaacgatcatccaggaaatgctttctttgacaaagcagattcaagacttctttttggctaggagaataaagacagaagaatgttcctggcctttaattggttcacaaccactttgtagcatctaatcccaaagctctgactttgctctagtttgtagatatacaaaataatttattataatttttatacttccttaaggatttttaaaatttgcatgtggccctttttaattagacacttttgtataatatccattttgtgctctgtaacttattaatgtaacataaaacaaaactgaatctacatattagacatgtatttctcaattattatatttcaatttaaataccactgaaatccttaattctatcatgagtcacacttttaatgtctcatgctgttatagattttacaaagatcagacattttaatttttttcctaagatttcctgtgcacctcaggtgataaatataagagtaagcagatgagaatggaagcagtaatcaagcggtgattctccatcatagctgtgcattccagatcctcctcacccccacctccacccctcccacatgggaaagcttttgaatttaccattgcttaatcttgcctcatctcagattaaatatgtcttggatgagtcccaggcaagtttgtttcacaagttcattccagctgattctaacgtgcatcagtttaggaatccctgaaatagaccaagatttctaatagtaatataggaggaggaaggggaaatacacagaaaaatagctggcatagggttaggtgcataagaactgaaacacctggtgaggaggaacacagactagagtaccgaaagcataattatggtgtttaaaaaaacgtcattgtgattttgatagagagcgaagttctataggataccatcagatatggacagcaaatggtcaagaggattaaggaatgagcttcctagattgaaagcatagacaaccccaggaaataaatagtcattaaaaagattaaggaacatagtcatatttcacagaacatatggaaagactttcaaatagcttgggttaaaaagccagtcagatggctatttatagagaaataattagtgagagagactacacaagtcagagattagaaatcagttatttaggtttgatatgcagccctatttagaataaaagtgcaattgatttggtagaactttaaataatttgctacagtaagtactaaagaactgaaagtaaactgttcaagccatctagataaagtcatagggccttgaaagccttaattctaacacagttgatttgaaagtgggagatgttcattctacaatacatttcttataaatataaagcatagaacctccaaaatcttctccgccctcacaatgtatttggttcttcatttaaaactggaaaagccactggggataaacaaaataaaataaatgaccgaaacctctagaaatatgagaaaaagtttcctgcaagggggcatttaatctggtgacctgaattctctgtactaggggttaaaacacctgcttatgcttctttttctcttaaacaacacaaaacaccaatactgatttattactatactagctgtaattcttgttaaaagaaaagccttagacaaatgtaatttaacagagtttagctgagcaaagaacatttggtaaatcagatagcctgaaccagaagaggttcagagaggttaccctgaagcttcatagtagaagattatttatggacagaaaaacgaaagtgatgagcaaaaaatggaagtggttacagaaatggctggattgttcacttttgctatgctttagcatggagcttggttagactgtgcccctgcccgtcaggtctgtggaacattgaacttgagaatgatgatttagggtacgtggtagagaaaatatctaagcagcaaaacattcaagatttggccctgctgcttctaacagcaaatgctcatgtgtgtgaacaaagaaatgaccttaaacgggaatttacatttaaaaaaattgcagactggctctgtgatagtaaagaaaagcctgttttcttggaaggaattcaagcaagctgcagaaatttgcatagctaaaaggaaggtaagcactgatagccaagacaatgggaaaaaaggccaagatggcattttagagaagttccttgcaccctctcccatcacaggcctaaaggcctaggaggaaagtatagtttcatgggccaggcctagggtctgctgctctgcacacctcaggacactgctccccatatcccagcttctccagatccagttatggctcaaagggaaccagatatagctcaggctactgcttcagagagtgtaagccataagccttggcagctttcatgtggtataaggcctgtaggtacacagagtgcaagagttgaggcttgggatcctctgcctagatttcagagaatgtttggaaaagcctggctgtccaggaagaagcttgctgaaggagggagccctcatggagaacctatactagggcagagcaaagggagaatgtgaggttacagcccccacacagagtccccactggggcacttcctagtggagctacaagaagaaggccaccatattccagaccctggaatgatagatacagcagcagcttgcaccttgcacctggaaaagctgcatgaactcaaccccagccactgggagcaattgtaggggctgaaacctagagagccacagaggcagagctgcccttggctttgggagcccaccctttgcactagtgtgccctgtatgtgagacaaagagtcaaaggagattattttggagctttaagattgaataacttccctgctgggttttagacttgcacggggctgcagcccctttcctttgggctatatatccctttcagaatgggagtatttacccagtgcctgtacccccagtgtatcttgggaataactagcttgcttttgattttacaggctgataggtggaagggacttgccttgtatcagatgagactttggactttggacttttgagttaatattgaaatgagttaagactttggaggactattgggaaagcacaattgtgttttgaaatgtgaggaggacataaaatttggaaggtcccaggggtggaataatatggtttggaaatttgtccccacccaaatctcaggtttaattgtaatccccaaagttgggggtggggtctggtgggaggtgattggatcatgggggtggagttctcaggaatgagttagcaccatgtcctcagttttgttctcatgatagtgagtgagttattctgagatctggttgtttaaaagtgtgtaacacctctcccctcactctctcttgctcctgctctagccatgtaagacatggttgcttctccttcaccttctaccatgactgtaagttttccaaggcttccccagaagcagcagccactatgcttcctgtacagcctgcagaaccatgagccaattaaacctcttttcttataatttacccagtctcaggcattcctttacagcaatgtgagaacagactaacactagctgaggctttgatataaacccaatattgtctcccaatgagctagataaggcaaagtatgcgtcacaaaagcttatgtgaacctatctgaagatttacccaaagtacacttgattctttttctttatgacccatacttcaagtttgttgttttgggcagggaggagggacaacagcaaagaaagttaaaactaaaggaagcatattaagagaaaaatgaaggaaggtaaaatggtttcttcataaggctgataatatatctagttttatccactcaactttgactttttgaataaatagagaatgatatcccacagaaggaagctatcatgagagaattcagagaacaaacaggatgttgaaagctaattaattcctcttcctactctggtattaatactttttttagtatcatggtcccaaaatgccgttggagttgattcttacactaatgctctcactgctgtgattgaaatgggagttacgatcaggatctcttcagtggtaagattgcagaatttatatattttttcttatttttgatggttcctttcagatagattgtcaacttgaattttggcctttactgctcaggtgacatggttcttatttatcttaccttcatttatgtaccagtatttaatctcacagatgtatttgcacatctatatcaaaccatgttttttagttctttatgcccattttctctatgcttcttgactttatgcctgttacacaatcatcctgtactttttcatgtccctaataagattgaatgccattcatagaattctaatcttatcttttagaaaatcttacatcaatgtgtctcaagtatttcttaacacatttctctcaacatcaaagtacactgacagggtagagggatcaaacagaaagactgaagttgtcattacattcctcttagtattttaaattatattaatctgatattatataaacatttgccttaatataaaaattaaagtggtgcttgtgtgtctttttttttttttacaatgaatagcttgaatttgatactgcaatggatttatcacagcatgctatagttactttaaccttagcacttagttgcacttgcatatttttgctgaagtgatggattgtttgttagcgtgtctcctttatattgtcttttccatcagataatttagtttgttgccggtggtcagtattaccaatttagaaggaggactaaagggataatgaggagtataaataaataaaggagaaagaggtggaaaaacaggaaaaggaaaacagacatttccataatgtatagtctttgccactctgattgcagaacatctgtgtaattgttcaacctgtgcatagcaactctataaaaacctctgttgatatgcatcaaaacaaaaatactctgtaataatttcatatgatgaacaaacaattcatttacatttaataacacagcttgtatgttaattcagagaaatccggtgctacaatcttagaagataaatctagctgatttgtaattaactcaggtttatatcaataagaatatattacattaaaactgaaaaaaaaagaaagaacaatagcagttatcttgtctgcattaagcatgtttcatttttcctggtatacatcctgtggattttacaatacttatgagatagtgtaattgtcaggtctcttaatttatggcttgttttcaccacagaggatggttttctccactgctacacagacccttacagataagacggctaagtttcagaggtgtggaaccccggcttcctttgctgaaggtgttttctaatgatttgtgagtttcaaggctataaacagaagttttgaagtacttgaacacatgttccatccagggtatacttggcaatcaaggtccattagctttaagcaagatctagaggatctttaaagagaactcaaacattggagaaaatgcaaacacatgaagatgaaataaatagaaaacaagctaacttaatgatgaaagagaattttagtttatgagtttctgaaactgatgaagaactagaaacagattgctcacaatttacagatggatcaagcaatgccagtgacctgcctgagaagaccgaacactaatgctgcggccttgagggtttcaccgggattccttacatctcaatgtaaaaaatctaaatctaagtggagaatgcttccatgaaagacatctctgagccactggaaaatgttgtgtttcatcagaaagtgaaagtcatctcctgataatagtaatggtagagtcaattcccatcatgaataaagaacagacctttccccccaaccaagtttttcaaaccaggtgattctacgtttcttatgtgaacttagggagagggaaggtttccacagagattaacgctgttgattacactgatgattaggcattctgagtccgttttaatttaccctacaaagggtaagtgacattttattttcttgccaggttctgacaaagcttcatattcactatacttattttgcatcttacatgacacatgaagtcaagaagaggataaagaaattttgaaaagcttggcaatcccttttataccaattaagctattcagcgtcacagtagattcctaatctcaccatggtgaaaaacagttgtcagttatcaaagcaagagtctagaactgcaatagccaaacacacacacacagcttgcttcttttcaattcactcaaaaataatttgtattcatctgcaaaaagtgtatactgattcatggaatattttgttatattaaagttgtcagtctttctattgtttttgttgccaaaccatcactacgtctcctttcctatatctttatctattttctttctgtaatcacagtacagaaagtgtttacagtgtacaaaaagtgtttaccaaaagggttttactttctgtaaaaatggtacctaaagatatgtagaaaaagaaagcattttatttctgaattgcgcttttgatacgagcaaaccctgttatactcctcatcaaatgcattagacataccatcctggcttagcagaggtgctcttgtaatctatgttcaggctcctccttagagtgacatcttctccactagaaactgacataaagagatagaaaataatgtattgttttcattattgtgtacctgatttaagttttatatacaaaaagtgtttagtataatggtctagtaataaatagaatgtcagtgtgtctttgtcttttaacagggaagaggtagatggagagatggagatgtggtacaacactgcttcacaatcttcatgaatttctgtagagcttaaggaaaccatctaggctacagtatttaacaataaagatcaatagcacagagtccctatgatacattgcatagcttcatacaggaagtgttttaacctaaagctttttaaccaattttataaaattctatgtgcatgcgtactaaattttctccactgtcttggtgttttaaaagactctggtaaatagcatcactgtccaaagaaaataaaaatactggagaaaacaaaaaaatacctagtggttatacttactgaaataaaaatgcttcatactctgaacatatgggtctttaataaaagtttaaaaaacgcattcttttgaagtttcaatacagcacattttgaaaactattagttttatgtacatatttgggtttgcttacatatcaaattttccccacattaattaaaattgggcgtcttttggactattattgcatattcttctaggatttatttaaaatgccaaaataattttatgtacagagtaatggcattatttaaaacaatggggaaaatacaactttgaatttgtgaagttggttttatcatttcattatactgaaagagaaacaataactgattatgctaacagtaccatcatgagaattttttaatttgttttaatcaatgaataaggatattttgtacttggttattattaatacagaaatgactgtttgtaattttgtttgtttcttagtaggatatgttttttcatcttctccctaacaatctttttagtcttcttacttagtaattgtttttcaccctaaaatgcaattgttaaagataaaaattagtattttctaatctaaaaaacttaaattaaaaatttactagaagggaattaattccatccaattgaaaataattatggctttattacagataaccactggagaagaaaatagggacacagcattaataacagggaacttaaaatagcttaaaaactttcagagaatttttgaatttatgaacaacaatatgataaatgttacattaatgttataaaggatgtgttatacaggtgtacatgtggactcattttgttttaacgtggtactgtagtacaaaatggattgttgcaagaaaaaaataatgtcatcagaagccaaaaacatgagcagtatttctgcaggaagaatgtttccacatccaaactgtggtggcgcaggtccagggtttgctgtggcagcacgcaatgctcaggcccaccaggagctgaatgaattcctggaggaccttgagttcgaggctgcggtgcagcaggcagaactggccattaagcacgtcatctttcccaagccccatctaccagggctccagcagaagctacttgtcaaggaccctcacggggttctggagggttacaatggactcatccatcattctctgagttgtgagcccattgctattgcttctttgttgttcagaggctggggttccaggggagcagagacagagaagactgataactgaggcctcttgctagctgctttggataagaaaataattctgaagacttgacaatattaatatatgcattttgctttttttgccagtaaataaaagatcactgttgtcttcaaatccaacaatgaagagcccctatgggcaacttaatcctaagtggatcaagtggttgcagaagctgtgccatccctgctgttttggccatggtgcataccttgtcctcaaccagggttacctctcagaggcagagggtgacctggtggactgaaaactagaatgcaacattgtactcctcacaaaggtagtatacctggccaataagacattcaactatagagccattgacagagtgatgtccaggggcaagcagcttatgctagagaaagtgtcaaaagttgggcagtggtttaaccccatcaggcaacccaccaaagcttggctcattccagctttttgttgaaggctataaaggtgcagactattgggtgtggcgttttgaagcagaactgcttcctgagaacattaaccagcaactgatcctgcagttccagccgctggtggtgctggatcacatcatctgcgacactgacagagacaatgacaactggtaaatgtgactgtccaaaggatagctctagctttcagcacacagactgggtgatggtgaaggagcctgttatcaaggtgtctgccatagacaatgggctggccttcccacaaaagcagcctgactcctagagggaatatcctttgcaccgggcctggttgccccggacaaaagtcccattctcttaggagttcaaagatctgatccttccaaagatatccaacccaacttcaaggacttggaagaggacctatgtgaactcttcaggaaagctcctgggttgggtctggtggctcatgcctgtaatcccagcactttgagaggcagatcacttgagctcaggagttggagaccagcctgggcaaatggggaaaccctgtctctacaaaaaaaaaaaaaaaaaaaagtaaaaattatcccggtgtcatggtgcatgcctgtaatcccggctacttgggaggctgaggaggaaggattgcttgagcccaggaagtggaggttgcagtgagccaagatcaggcaactgcactctagcctgggaaacagactgagaccttgtctcttaaaaaaaaaaaaaatctggttttgacaaggaccagtttgataagcagattactgtcatgctgggtcagatcctaaatctgactcaggccttgaaagacaagagtcccctgcaccttgtccagatgccacctgtggttgttgagatgagatggcccattcccaccagcggttttctagcgaatcctacacacagagatttgagtttcaaaagtcagaggaaggcaaaggaagcactgtctgaaacttgtgggaggaagcctgtggagtggggtgcaggaaaagccagagaagccagtggagagcagaacctttaaaatccctcccattctgcttgccaccacccttgggtcttccctacccacaaggagaagcacaggaagagtgagtgctccttggcccttcttagtgccagggatgcctgggaagaagcatctccctttcagcatctgctggtggcaggatgggacagtcccttccttccctgacaccttgctctattgtaattctctattctgcatcagcaaaagcagacaaacaagaaaaccaatgcttgtagcacagcccagatcccctcatgtcagaaacctttaatccaggcctaaattagcatagatccagacactcagctgccttgctgttgcttactcccacgaaccaagactgtgtcagagggcaactggatggctcacagtgctggaacagacagaagccacacctttcctttgggtttttgccaagccttcttccccttctcccaccagtgctgtagggtgcctgcaaacctctaaacagttctcccaaaagggaggtttttgctctacacctcccagcagttctgcacacaatcatggggaacctctctgctccctgccgtgctgcagcttgtctgtctctcaagcagaggcagaaagagctagtcttagcatttatattttaataagaagttgactcccagcatgtaaaagtgatccacatggcttaaatgtatgctgggagccgtaagtgctctatgggtgaaattatcccgccttgcttcctgagtccttggtcccaaccatctaatttgttccttttgttttaattttttcctccaactcttttgacttaagagttcagtttcttctgagtatgtgtctgtgagggttctggggtgagtcttggtttacaagaggacaagatattattagtggatttccttctatgctaccactgctgattggtggaagtaacaagacttgtattctgtgccctgcctcctaattggcagattccctttactctctgacttgtctcaggccagtttcttcatggcttcttgagaaagacagggcccaaaggagagaggtctacaaactgtccccagttcctgcccagcccagtgcacatcttcttgcttccttgtaactttttccccggctacccaaccccactgccaggtgtttgagccctttctacaccaaaccaaagaacggcctgaggaggaagtaaaaagggtgccatctgtggatgaagggcagctgtgttcatatgccctgtactactgaacacttcacagttctggcaccttgagattggttaatcaactcaaaaagaaactatcttgaaggtttgaagaacaaccaaagaaagggagcaaggactagggctgtgtatcttctgcttacccagctttggagcagagatgtgtcagctggtccaggttggcctccttccagtccagcctccaggagtctgcttgtcacctgtgattattgaggtgcctggcagagagaaggccattccatgagtgccacccatctgacaagaagagtttctgtgcatgccctatggacaaaggcacagctcacctgccttcctcagccttgacaatcccatgcagctgacttggaccctggccttgggaacaatgtttgagagaatacccgtgacctgactgtaggagccagtaggggatccaggtgtgcatagctatctgtagacatctttacacaaatctgttggtaatgctccccacttggtgctcaagagaaccttgggagtctaacaaggaacctggctgccttacctggccacatcctccatgccagatctgcacattgtcttaatccagagcagctctgtgataagaaggaaattgggccctatgtaagagggagctagccctgggcctagcaggcaaaagaatgtggggtgtcttttcctggcctgtttccattctgcctagaagcctgtgcttacgttgcattgaatgtggatgctagaagagccagtggtccagagtgccacagaaggcttctgggcggcacttcatggaatggcatggtccctctgccagccagcatcagggagtggaggttgggctgtgagagtgctacttccccctgtgttgtttttctgatgcactgtagaaattgtacataatatatttaaatcaatgaaaacatatgaataacaaatccaattctgaaacaaaaaaataaatttgtaatgatgagtatcctggaatggaaggaagacaataaagaaaatggaaacctaacagcatgtatgtattagtccattttcacactgctataaagatactacctgagaccaggttatttgtaaacagaaaagaggtttaattaactcacagttctgcatggctggggaaaactcaggaaacttacagtcatggtggaaggcgaagatgaagcaagggccttcttcacatattagcaggggagagaaagaccgcaggggaaactccacttttaaaaccatgagatctagggagaaccctctcactatcaggagaaccacacagggaaaatcatccacatgatccagtcacctccaaccgagcccccttcctctacacgttgagattacaatttgagatgagatttgggtgggaacacagagtcaggctcagtccagggacaccagctacaatgcagtaccttacttattagcaagatttatgaagagagctatgaacacttcataaacaccttcagagtggtttcatcaagcgaagtattcaataccatgatcagagtttccaagaccaccctctttatttacctatagaacccagatgagacctattatacagcctgcccataacgttctgtgtgacctctgcctcttttttttttttttttttgagacggagtctggctctgtcgcccaggctggagtgcagtggcgcgatctcagctcactgcaagctccacctcccgggttcacgccattctcctgcctcagccttctgagtagctgggactacaggtgtccgccaccatgcccagctaattttttgtatttttagtagagacggggtttcaccgtgttagccaggatgatctcgatctcctgacctcctgatccgcccgcctcggcctcccaaagtgctgggattacaggcatgagccaccgcgcccggccgacctctgcctcttaaacccaaaactgaccacaccaatgtgcaagtttgccatctactttacatcagctacaatgagtggtattactctatcccttcactttcttgctaaactattagtaaacatggctttcttaatttgactccacaagatggttgcaaatgagttacagttccctttctttttgctagtgcatgacctgctgcactcaccaacagataaaacaggagttccaggtctttatctgcctggtctttgatgcagcaaacaaggtagcagtgtgtgacccacctacccactgctccctaactcctgtagctggtttctacccacaggtgaacacaaagggagtaaatgagcagatcttgagtatacaaataaagaacagtagccacttagaactgatcctttacataatcaagatatcagtctctagcgtactacaccaccaacaatattggtaccctagggttatttaagcactctgagcagtgcactaccacgtttcatgagtttcagccttcttccactgacacacgtagcagagcatgaagaaaatgatattcatggaaggttaaagcaatactaaagaaaaaacaaaactcttcttaaacccagtgattctagaatactgcttataagagaaggaatttgatgaggagttcaaagagacgtcaggaaaagctgcacatgtcatcttcaattgctcctttacctctctcaaaatttgcatccttttgttgagacaaagtctcactctgctgtccaggctgcagtgcggtggcacaattatatctcactgcagaccaaaaaacctgggatcaagtgatccttccacttcagcttcccaagtagctaagactgtagatgtaccaccatacctgggtaatcttttaattttgtttatttattctttttttagagatggggccttgcaattttgcacaggttgatctcaaactttcgatgtcaaacaatcctcctacctcagtgtctcaaagtactgggattacaggcatgagccaccatgccaagactagatctggcatctcttctatcgttttatttccaatctaacatggtttctgatacatgataaggacttaattaataataaattgttgttttggaaggaaatacagtatattcccgcaccataccaaaacacaaacactctctcccccaccccacacacatacacccctatcccctgtcccctcacacacacccatcccccctcaccatacacagacacacacacacatacacacacacacacacacacacaagcacacaattgttgtgggtagggtcaacttattatgacaagaactcagaatatttaaatatttggaaaaccaaagaggaagatgcagtggagtcacaggcaatcaaattctgctggccatttattgtgattatcttctaccctgggttgaagatatttcattaatagaccttaattatgctaacaggcatgtctttgtcttcattgtttactgttctctttgctttatgctccatccgctgagaggattttctgtgaaaattgaccttattgaccatatcgaaagttggcatagggagtatgcacaccttgggagagggccacatgtttataagaacaagactgaggacagaactaataggagacgtgtgtgtgtgtgtgtgtgtgtgtgtgtatgtgtgtgtatatatatatgtatatatgtgtatatatgtgtgtatatatgtgtatatatacgtatatatacgtatatacgtatatatacgtatatatatataaaatgaaggggagtttattaagtattaacttacatgatcacaagatcccataataggctatctgcaagctgaggagaaaggaaagcctgtccgaatcccaaaactgaagaacgtggagtctgatgtttgacggcaggaagcacccagcatcggagaaagatgtaggttgggaggtgaggcccatctcgccttttcacatttttctgtctgctttatattcgctgacagttgattagattgtgtccaccacattaagggtggatctgccttccccagctcactgactcatgtgaatctcttttggcaacaccctcacagacacacccgggatcaatactttgtatccttcaatccaatcaagttgacactcagtgttaaccatcacacagaacatggaagttttttgtttgtttcttttgttcattcattcatttattaaatcattcattttgaagagaggctttggttcacattgacagaatattattattatggaatgttggttcaatgtaagcaaattaataactgactcatcacataaacagaactgactgaagaaacaaacaaacaaacaaaaaataatgatcaaatcaatagatgcagaaaagggctttgaaaaaattcaacatccctttgtgataaaaaccctcaacaaactaggcattgaaggaatatacctaaaattaatgagagccatctatgacaaacccacagccaattgtatgaataggctaaagtgggaagcattccccttgggaacccaaacaaagcagggatgtccactcttacctctcctatttaacatagtactggaagtcctagccagagcaatcagctaagacaaaaaaataaaaggtatccaaataggaagagaggaagtcaaattatgcctgtttgtaggtaacatgaatttttttttttttttttgagatggagtctcacaggctggagtgcagtggcatgatctctgttcacagcaagctccacctcccaggttcatgccattctcctgcctcagcctctgaagtagttgggactacaggtgcccaccaccacgcccggctaatttttgtatttttagtagacagggtttcatcatgttagccaggatggtctcgatctcctgaccttgtgatccaccggcctcggcctcccaatgtgctgagattacaggcgtgagccaacatgattttatacctagaaaactccatagtctctgcccaaaagctcctagatctgataaacaacttcagcaaggtttcaggatacaaaataaatgtacaaaaatcagtagcatttctatataccaacagcatccaagctgagtaccaaatcaagaacgcaatcccactcacaatagccaaaaaaagaataaaatacctaggaatacagttaactggggaggtgaaagatctctacaatgagaattacaaaacattgatgaaagaaatcagagatgacatagacaaatggaaaaacattctatgctcatggataggaagaatcaatattgccaaaatggctatactgtccaaagcaatttcaatgctatttctaacaaactaccaatgacattcttcacagaattagaaaaaaaattataaaatttatatatggaatcaaaaaagagcctaaatagccaaagcaattctacgctaaaaacaaaacaaaacaaaaacaaaaacaaaacaaacaaaaaaaacttggaggcaacacgtgacttgacttcaaaccatactacaaggctataataaccaaaacaacaaggatgatactggtacaaaaactgacacatagacaaatgcaacaggttagagaaaccaaccaaccaaccaaccaaacaaaaaagactgcatatacacaaccatctgatcttcgacaaagtcaacaaaaacatgcaatggggaaacgactccctgttcagtagatggtgctggcataactggctagtcatatgtagaagattgaaactgtgccccttccttacatcatatacaaaaatcaactcaagctgaattaaagagttaaatttaaaatctaagaggataaaagcccttgaagaaaacctaggaaataccattctggacacaagtcttgacgaatgtttcatgacaaagatgccagatgcaattgcaacaaaaacaagtgggacctaattaaactaaagagtttctccacagcaaaatcaactatcaacagagtaaagagacagcctacagaatgggagaaaatatttgcaaactgtccatctaacaaagtcctaatatttggaatctataagaaatttaaacaaattaacaacaaaaaaatcctattatgtagtgggcaaaagacaagaacagacacttctcaaaagacatgctgactagtctgttttcttccaatcagtcccaactgattgtctgcacacccaaagttattttctatacatagtatcaatcattttttatttctttattttttcatacaccaacaacttatgaaaaactgctcaacaccactaatttttagagaaatggaaatcaaaaccacagtgaaataccatctcacaccattcagaatgaatgttattaaaatgtcaaaagtaacatatactggaggattgctgaaaaaaagaatgtttatatactgctggtggaaatggaaattggttcagccactgtggaaagcagtttggtgatttctcaaagaacttaaaacagaactaccattcaacccaggaatctcataattgggtgtatacacagaagcatatatattgctttgctatgatcacatgcaaatgtattttaatcacagcactgttcacaatagcaaagacatggaatcaacctaaatgcccatcaatggtagactagataaagaaaatatggtgcatataagaccatggaatactacacagccataaaaaaggaagtgatcatgacctttacagcaacatggatggagccacaggccattatcctaagtgagctaacacaagagcagaaaaccaaatacagcagaagccaaccatagacactggggccttctggagggtgaaggatggaaggagactgaagattgaaaaattacctattgggtactatgctaattacctgggtgatgaaataatctgtacaccaaacctccatgacaggcaatttacctatataacaaacctgcacatgtacccctgaaactaacataaaggttaaaaaatgttagaaattacactctgctcatttccaggctcagaccttaagaaacttgagaatctttaagaatcgtgcacatacaggcttattttccctcatgttcttatgtcaaatttcaattacagagctacatggatatgttcactttatgaaaattttatctgtacactttagctttgctcaatttcctgtatatgcatgacaaacggaaaactttcaattagaattaaacagttgaataaagtttgacaattatgtgaaaaattcagaaaagtaataatctagctcatatgttatatatataatatagcatagtatattatctatatatcatagtatcaatagtatcaatcattttcccccaattatgtaaaaaattcagaaaaataaagtaatatagcgcgcacacacacacacacacacacacacacacacacacacacatatataatgtccacagatttgcagtttatctggggcatctctgcctcaggcttatcaggtagttgggatgagctgcaggctgagttagattcaggttttctcaatgcatcttcattttccttggactagcagttacccaagtcatgctattctcctcacaggtggcagatatccaagaagtcaggacaaactacgcaaacacatgtgtagactctgttcatataatatctgctactgtttattatagtgcctaactgaagctcaaaattaatggggatagggatatagacttaacccactttattacaaggcactggaagatcacttagagaaggcaagaagaatcagaatgataatcaacgtaccgcaatgctatataggataatatagtaataggacatgggtttaaatgagtcatgattgtcaatgatgtagcaatgtgtggagaattggaaatatatagatttttgttaaaacttactcctgtgggctgggtgtggtggctcatgcccataattccagcactttgggaggctgagatgagagcatcacttgagtccaggagttccagaccagcttggtcaacatagtgggaccccgtctctaaaaaaaaaaaaaaataagaaaaggaaaaagaaaaaaaaaacttgctcctgtgaactatatttaaaacattgcaccacctattcctgagacatgaagtgcctttcaaggcttatataatattctctgtgatactcactgtctgttttcacttattacaccagtaaacccaaaagggtcatgtttgctaagtggtgacttagtaccataccctgtccttaaacatatcttatatcaaagcaacaaatttgctcaacatggtgtagcaattagttgtaataggaatagatgagacaaaagagtgttttgaatggtttaattttgttttgctggggtgggaagaatagaaataaaatatttggttttggacatattgagtttgcaagtgctatatgacagaatgaaagaagacattatatttaatattagaaaaaaagatcaaataatcaggagaggtatgcaaaaaaataaatgagttgaagcatagatagaaatatttatctctccaaagactgttttcttaatttcgaagtaaaaatcaacattgtttttactccagccaaatagacactacacaaaggataaaaactcaccatagagaattaaaatgaaagcattagaaatatcctttcctttcccaccttgtctagcgatagtgacaaagagtaggaataatctaatggagattaagggtgtcaggttttatcattccagaaagagtacaggacacacttatggcaaagaaagtaagtatgtaatcccatcagcctacaggtcgttgagaaaattatttgcattgattagttcagggattcagagaaattctgccatatttctatgcgataatttctagtctacaaaagagcaaaatagagaacttaagtatcgggctcattttatcagacagttgtaaagagagggcaaatggaccttcctttttatgaagttaaatgaatgttgttatgacattgctgaaagtgggatagcatccctctacaccttatatgatacactaattcttccaaattatgttagcaaatgccaataaaaatcttataattcaaatatatgatttctgcacatattaaaattattacactataacaaagttacaccaactcttttataacttaagacattctgattttatttaatatatttgataatttgttgattaaagaaaaagtctccttaaatttggagaaattagaaaaccctctctcaccataagaactttttccacctaaacaggaaatgataagaaaatgggtgattttcagagtccagaaaataagataatatttttcaaggataaaatatactcaaaattttgcaaacattcttatttacagcaaagaaaaataagcaaaattgttaacaatggataaactaggatttccacacacacagacacacacacacacaggcacacacgcatacacacagggataatcaatactgccaaatgaagttaagaggtcaggtagatttaggattaaaaataattcatgaaatctggtaattactaaataataagtgatcattgaaagaaaacgtttattagaacagtgtttctagaaattagattatgacagttggatgagatgatgggaggtgaataaatgaaggttatgatgtcaattttcaataatattggttctttctttctagaatatgcttctcctattgctcttcctaggaaagttttactcatatcaaaactcagaggaaaatggagtgaagaatatacgtgtccctgatatatgtatacgtgtgtatgtgtgtgtttgtatatatgtgtatgtgtgtgtatacatacacatgtatatatgtatatgtatttgtatacacatatgtatatttcacttgtatgtaaccatgtatatctagattaatctagacaaaagctcatactgatgtctcaatctgcaatacattacctcatagttcattccacccttctcctctctcttatctgtaaccttccactcaaatagtgagagacatatctcatgcaatctataatcaatttactgaattgttcatattctgtatatatgtatagctgtaacagacttacaacatgtaaatctttggtaagctactttatcaagtatattacagtgcctatgtacaatttcttttgtttctggccttttagactcctctcatttataaagttacttaagtcagcaccttttccctctacctccttcagtgaggttgtgtcataaatttgtaatatagttagatcattttgtcagtcaacattccatcctgggattacactaagctcctgcatatatttttaaattccatactttaagtttcactgcttgtaatgaaagtcctataggttctaaaaagtccatctttgctgaccagtattgtctcaataaaatagattatattgtgtgccgtggtgagagagaattacctgggttgaagatatggttgaagatttgaagttagttttgaaagtttagaatagctgccacgtgaataaggaaatggggctgagaaagaaatgtcaaacaaagaaaaattgctgagttgcttcagtgcttaagcaaagctgctatcataaatgtataatagatataattaaagagaacatgaggtttttccagcagcacttctcagcccagggaaaagtgagatgattagattggtcaacattttggcattgccaaggagaggtcatcggcagaaggtgaaggggactgaatagatggaaagtagtagggagaaagtcactgagatgattaaccatgagattggtccaggatagcctgggagggaaatgaagtcagataagttctatattctaatagattaagatgagctcagtgattagaggtcagggatgactgtaacagcaggtttggctaagtggaagagctgagattacaggaaactggctggttaaggggcaatttcagacttcaggaatatgatttatcaatatagagtttcaacccactgaatttaacgagaaggaaaaagcatatgtttgcataataaggagacaaatagaacatctcagtcttcataacaattgaatttgggaaacataaacttgatttatcactcatttagttttgattgtaactacattgttaagcctaaaagctgtaaatcaacttcttgaatagatttgttagtgactgcaattaattaaagctaattcaaatatactttataaaataatcagaggttaaaacttatatttaaatttagtaattaattgatacatggctagtgttcctatataaatctttctgggttttaacttcagacagatacataaatatttcagttatttgcacactgactgttccaaatctcaagtcctgaaaagtattaacctttgattcatcttgatttctgcaaagaatgtaaataactttagaaagaagacataccacactgatcaaaagttaataaattaactaaaattttttctaaccttaaagtaactgaattattacctattaaagataggaatcatgataaaaaaaataaatgaatgctttctgcaatccaaaactgaaaaattaagtaagttatttaaaagaaacctcttctaaaaaaacttttattttcaatcaaatagctcagtgagcttctcaaaaaatatgtatcatctctatctgtgattttggttgcatttttgcctttgtatgcatgaaattctatttacttacattaagttaagcttcttgaatttgtctctttactaccatttttggctgaaaataatacacagacttcatttattcttggatgattataataatgataagcagatagcaattaaaaatgaaagaaaacattctcaattattattactaatgcactgaatttacattacattacaaataacatttttacaagatttacttgacctttaaggttttgtgcattctagttattacctttaaaataaccaagaatatctgaaattttggcaatgctatatggtacaatatgaaactgttggcaaaactgcctacatatagttccgtagagtcggagcttttccatatggaagatgacttcataaaacctccccagactaaatatgcactttgtctcatattttcagattctagattaatttgcacaattagtaatcatactgactgaaaggactataatttaccataaagagtttaccaactgaaatatattaattcttctatatgtaagcatatcacaatgttaacaacatcagtgattaaataaataattgatggtgctagcgttagtaggaatgatttgctccttcattacagtatgtatctgttagctcaagacatttggtttaagaccaacgttttcacagacaaaaaacgttaaaatagagcatgaaatgattacaatgagtagcacaatgagacaaatcagagggttgcacaatgatgtcatctctagagtgaaattatttcttggtgttttacttaaactgtagaaatgacgttattaattaagaattctgcaagaacttttccctaattttaaaagcagagtattaccttataagaaatatgtagcttaaaagactgctaactaaagcacatttgaatagccaataccataaaagatttgtgagaactgtgtttccatttttaaggaaccactcctgaaaataggtttcaagtttgcagccatcaagaagaaatgtgtttgggcatatagaaagcgctctttacagatctgttatactcgggaactttgaaggttatttgaatggctgaagaaaactgtcaaacagattatttaaactttacaagttataaattcaggagaaatcagtggatatagggtacaactctaggggaccattgatactttttgagtttgctgattcaatttggtggtttcatattgtgtgtttaagaagtgttggtccagaaaatcaggccaatgataaaataatttaacacttaatgattgcctttcaatatgtatttaaaatgtatacaactctaaaatagaaaaattgcatcgtttccatcaggaattaaaactcatttcctagtagcatccacaacagtaaattctcaatttgctggaaccaaaatttccggaaaccaaattttatttcttagcactcagcattaggatagtcatgcacatcaaaagaaaatgggattagtccaaaaactgtttagtgtttaactgtcttcaaaaacatttagccttctgatcagatctatatgtacatggttatataatgaaaacaactgctcagtacactcccttttcctccccaataaactaagaaaattgatattaggcacgtatcataataaaatggacatgagaaacaaaaaatagaaaacctcaaagttatacacctactgtgtgcaataaagtgtgctaagtatttttaggcgttttagacttcagagaatatagatttttttctcaagcaacctaagagattagatggacaagaaaaaatccatatattaataattataagttaaggttgaaaattataagtgctgtaaaaggtaaaggtaaactagtatctactttctgagatgaaaaaatttatttttgtagagggctgcaggaggtttcctacaccgagtctcatttactgtggccctcaaataagtattatgttgatacatggtgagcagaagaaaatatactacagagagtgaatagtaagagcaaagacatttttaaaatcagagcactctatggaaatacatcacttgtggttaaataaataccttgttgagccggttggatcaagattcaatatcctttctcaatttacaagctgtatcatgctggatcaattatttactctgctcatctgcagaaattgatacaataataataatgcttttattatggtttgttttaaggacaatgagaagatacatataaaattcctggtatatctattattattattttcaatatatatttttgcattgtgaagtttttcaaaaagttacagtttaatatatgtttcagtatttacgttgctgtcccatgaagtagctaatattgatttgttaatctcaattggtaaactgttatctaataagtaagttagaaaaataactttgatgttgttaccaagtattttatatttagatttcaacatgtgtaagtaatgatatctaatatatatggtgccctgtgtgacagataatgtattttacatgtgttgactgaatgaatctttacaataaccctatcagggaggtaccaatatatccccattttataaatgagaataagaaagtgagttcatgcttctagatccactaatgtgtatgataaacaaccctaagaacaaggaatatagaatttaccttgccttattacacaactagggaatccctaggaaatccctagaaagatacagaattagtcagtgtaatgtggattagttatttgtacgagttaaaagagcatgatgcaactgatttcatttaatgaattctgcagatatttactgtgtacttctatggacataacactacactaggcactctggagggtgcaacgattaagtttgtctcaatctgtttaggaagccctctatttacatgcctttctatacaaaattgccataatagagacataggtgtagtgctacctgagcaaatgtaagaaaaatatacattctgctctgttttaatcatacagaacaatgtaagggaaaaaaaatcgtatttgaactacaccttgaaggataactgagaacttgtaaagaacagcctaatcagagggaatagaattagcagaagtatggaatatgaataaaatggttactacagaaagatgtagggttagatgtggctgtaactataatgaggaagattgtggaggcttttggaaaccttgcaaatctgatactttcctgcaggtaatcaagatctaagaaaagcctctcaataccccttacataactacatataaattatctttatattagagagcggtaactctggtggctttataaatgacaggagaaaaaggaactgtgagaaatatttcagccattatttcacaaatcaagaaaagagatgatgaggatctgctctccgaaaatggcttgagaaagttgatgctacagtgacatttaaggtgtgatagggcattggaatctgcaatgatatcaaatatttcaaaaccatgtaactgggaggaaagggtcaaacaaggaatatggaaagggtatctgttggatgaagttgagtgagtataataatagcaggataatatttattatagtaaataaatatatatgtatctataaagtatactcaagcattttgatcagtaaaatttgggaaagatgaatgcaaggaattgtaaataaaccagatagccttgaataaaatagaaattatactaagatcgagaaagactgaatagcatagttgtcatataaaagccaggtaagaagagtgtccaacaacgttttgatcagtaatgaatcggccagtaatgaatccccccagaggtctcaactggcccctatttttaggaagatgaaacatccgtctgctccataaattatgagatgacaaggcctagtaaattgtaaaccggtgtgagacatttagtaacaaggacttgatagaaacagagggcaaaaaaagggcactacctaaggagttacaggccatagactttgttttatatatactaggctcccaagagtattttttggctccttttctgagcaaaaaaggcactagctgaggagttacaggccagagactttgttttatatatattaggctcccaagagtatttttgagtgtaggtaaggcgatttctggtgatcgactccctgggaaaataaggacactcaaagtggaataaaataaaagcattctctgcttattatttccaattgtttctaagaagatggctgactacatataaggaatctagaaaataatcagtccagaattaattaatcatgaatactgttagtgacatactaatggcaggtgtctggcattgttctttgtgtattagaggtatcatctcttgtatccattacacaaaccttagaagtaggtatagattcattttctgcagtgggtttctagtctactaatgaagcagtcatgtacttatactcatcacatacacagcaagtattttatttttcttttatcaattgtgcataactttttaaaatttttatttccataggtttttggggaacaggaggtatttggttacatgaataatctcttctgtggtgatttgtgagatttcggtgcacccgtcacccaagtagtatacactgaacccaatttgtagccttttgtctctcacccacttcccacctctttttcccagagtccccaaagtccattcttatgcctttgcatcctgatagcttagctcccacttatgagtgagaaaatatgatgtttggttttccattcctgagttacttcacataaaataatagtctccaatcccatccaagttgctgtgaatgccattatttcattcctttttattgctaagtagtattccatatatatatatatatatatacacatatatatatattccatagtttatatggtgtatatatatatatatgtgccatagtttatatggcatatatatatgacatatatatatatgccatagtttctttatccacttgttgattgatgggcttttgggctggttccatatttttacaattgtgaattgtgctgttataaacatgcatgtgtaagtatcattttcatataatgacttcttttcctctgcatagatactcattagtgggattcctggatcaaatggtagttctacttttagttctttaaggaatctccacactgtttttcatacaggttttactagtttacattcccaatagcagtgtagaagtgttcaaaaatgaccatactaccaaaagcaatctacaaattcaaggcaattctcaccaaaataccagcatcattcttcaaagaactagaaaacaaaatcctaaaattcatatgaaaccaaaaaagagacagcatagccaaagcaagactaagaaaaaagaacaaatctcgaggcaccacagcacacagcagtggaacagaatagagaacccagaaataaactcaaacacttacaaccaacttatctttgacaaagcaaacaaaaacataaagtagggaaaggacaccctattcatcaaatggtgctgggataattagcaagccatatgtaggagaatgaaactgtatcctcatctctcaccttataaaaaatcagctcaagatggatcatggacttaaatctaagacctgaaactataaaaattttagaaggtaacatcagaaaagtttttctagacattggcttaggcatagatttcatgactaagagccaagagcaaatgcaacaaaaacaacaataagtaggtgggacttaactaaaagaaagagcttttgcatggcaaaaggaatagtcagcagagtaaacagacaacccacagagggggagaaaatcttcacaatctatacattcgacaacggaatctacaaggaactcaaacaaattagcaagaaaaagacaaacaacccaatcaaattgtgggctaaggatgtgaatagacaattttcaaaagaagatatgcaaatggccaacaaacatatgaaaaaatgctcaacattactaatgatcagggaaatgcaaatcaaaactgcaatgtgataccaccttactcctgcaagaatggccataatgaaaaaatcaaaagataatagatgttggtgtggatgtagtgaaaatgtaacacagcaagtattttattttattctagttcaatttttatttttaatttttgtggatatgtaataggtacaaatatttatgaggtacatgagatattttggtataggcacataatgtgtaataatcacatcatggaaaattggatatccattccatcaagcatttatcatttgtattacacatcatctaattatactcttttggttatttttaaatgtgcaattaaataattattgactacaatcaccctgttgagctatcaactactaagtattacttattatttctttttcctttgtacccattaaccatttacacctcccctctacttccccactactcttcccagtctctgatgactatccttctactctctatctccatgagtacaattgttttaatttttagctctgacaaataagtgaaagtgtaagtttatctttcagtgcctgacttactgcacttaacataatgccctccagttccatctatattgttgtaaatgataggatctcattattattattattattatgcctaaatagtacttcattgtgtataagtagcacagtttcattttaaacattttttatttatttctcactctgtcttctggtgctgaaggtaccacattttctttaaccagtcatctgttgatggacacttagattgcttccaaatcttggctattgtgaatagtgctgcaataaacatagcagtgcagatctcttcaatataatgacttcctttctttggggcatataccctgcattaggattgctgaatcatacgtttcatgcgcgtccgtgtgaagagaccaccaaacaggctttgtgtgagcaataaagctgtttatttcacctgggtgcaggtgggctgagtccgaaaagagagtcagtgaagggagataagggtggggccattttatagtatttgggtaggtaaaggaaaattacagtcaaaggggatttgttctctggcaggcaggagtgggggttgcaaggtgctcagtgggggtgatttttgagccaggatgagccaggaaaaggactttcacaaggtaatgtcatcacttaaggcaaggaccggccatttacacttcttttgtggtggaatgtcatcagttaaggtggggcagggcatattcacttcttttgtgattcttcagttacttcaggccatctgggcatatacgtgcaagtcacaggggatgtgatggcttggcttgggctcagaggcctgacaatacagaggctcaatttttagtgttttgagaaaccttcaacttgttcttcatagtggttgtactcatttacattcccatcaatagcatacataggttccctttccacatttgttattgcctgtcttttgaataaaagccattttaactggagtaagataatatctcaccgtggtcttgatttgcatttctgtgacaatcaattatgttgagcaccttttcatatgcctgtttgccacttgtattttttttcttttgagaaaggtctactcaaatatatcacctactttattttttttttcttgagacagaatctcactctcactctataacccaggatggagtgcagtagtgtgatctcagctcactgcaacctccgcctcctgggttcaagagattcttgtgcctcagcctcctgagtagctgagattgcagatatgcaccaccatgtccagctaacttttgtatcttcagtagagacagggtttcaccatgttggccaggctggtctcaaacttttgacctcaagtgatctgcctgcctcggcctcaaacttttgacctcaagtgatctgcctgcctcggcctcaaacttttgacctcaagtgatctgcctgtttcagcctcccaaagtgcagagaatataggtataaaccatgaaggctggcacttttgcctgccttttaatcagacctttaaaaattttcctgtagagtttgagctccttatatattctggttcttaattccttgtcagatagtagtagtttgaaaatatttttcccattctgtcggttgtctcttccttttgttaattgtttcctttgctgtgcagaagttttttaacttgatataatcccatttgtccatttttctggctctgtgtccctactcaaatctcttcttgaattgtaatccgaattgtaatccccacatgttgggggagggaccttgtgggaggtgactgaatcatggaggcagttcacctgtgctgttcttgtgatagtgagtgagttctcatgagatctaatggttttgtgaggggtttttccccactttgctctgcacttctttcattcttctccttcttacttccatgtgaagaaggacgtgtttgcttccccttccatgatgattgtaagttttctgaggcctctctgttctgcagaactgtgagtcaattaaacctctttcctttgttaattacctagtcttggatatttcttcatagcagcataagaatgggctaatacagtaaattggtactggtagagtggggtgctgatataaggataccccaaaatgtggaagcaactttggaacagtttagaggacttagaaaaagacaagaaaatgtgggaaattttggaacttcctagacacttggagggctcaggagacaggaaaatgtgggaaagtctggaacttcctagagacttattgaatggctttgaccaaaatcctcatagcgatatggacaatgaaatctaggccaacgtggcctcagatggagatgaggagttttttgagacctggagcaaaggtgactcactttagcaaagagactggtggctttttgcccctgccttagagatctgtggaactttgaacttgagggagatgctttgggatatctggtagaagaaatttctaagcagcaaagtttttcgaggatgcaaagcataaaatcttagaaaatgtgaagcctgataatgccacagaaaagaaaaactcattttctggggagaaattcaagccagctgcagaaattcacatacttaacaaggagccaaatgttaatcaccaagacaatggggaaatgtctccagggcatgtcaaagacctccacagcattctctcccatcacaggcccagacgcctaggagagaaaaatagtttcctgggcagtgtccagggaccccctgctgtgtgcagccttgggactggtctcagctgctctagccattactaaaaggggccaaggtgtagctcaggatgttgtttcagaagctacaagcccctagccttgacagcttccatgtggcattggtcttacgtgtgcacagaagataagaattgaggtttgggaacctccgtctagattttagaggatgtatggaaatgcctggatgtccaggcagaagtcagctgcaggggcagagccctcatggagaacctccactagggcagtgcagaaggaaaatgtgggttcagagcccccacatagggtcccccctggggcactgcctagtggagctgtgaaaagaggaccacagtcctccagaccccagagcagtagatccactgacagtctgcacagtttccaggtggaaaagccacagacactcaaagccatacatgagagctgggctggagctgcccaagaccatcagggtccacctcttgcatcagtgtgacctggatgtgagatcattttgcaactttaaggtttaatgactaccctattggattttggacttacacagggcctattacccctttgttttggccagtttcttccatctggattgggtgtatttacctaatgcctgtatccctattgtatctaggaagtaactgacttgctttttattttacaggctcataggcagaagagacttgctttgccttacatgagactttgaacttggatttttgggttaatgctggaatgagttaagactttggggaactgttaaaaggacatgattgtgtttccaaatgtgagggcatgagatctggtaggggccggggtgaaataatatagtctggctctttgtcctcattaaaatctcatcttgaattgtaatccaaattgcaatccccacatgttgggggagagaccttgtgggaggtgattgaatcatgagggcagttccttatgctgttttcataatagtgagtgagttcttatgatatctgatggttttgtgaggagctttttactcccttttctctgcacttctctcatttttctctgtactgctgccacataaagaaggatgtgtttgcttccccttctaccatgattgtaagttttctgaggcctccccagccctgcaaaactgtgaatcaattaaacctctttcctttgtaaattactcagtcttaggtatttcttcataccaatgtgaaaatgaactaatacagatgggtggtttgaaaatattttctcccattctgtaagttgtctcttcattttgttgattgttttctttgttgtacaaattttttaacttgatgtgatcacatttgtaaatttttgctttggttgcctgtgaggtattgcttaagaaatttttgcccagatcaatgtgctggaaagtttccccaacattttcttgtagtagttttatagtctgaggtcttagagttaagtctttaatccattttgatttttttttttgtgtgtgtgtgtgtatggcaagagataggggtctagcttcattctgttgcatatagatatccagttttcttggcaccatttattgaagagactgtgtttttcccaaagtatgttcttggtatcttggtcaaaaacaaagtcactgtaggtgtatggatttgtttttaggttctctattccattccattgggctatgtgtctgtttttatgccaggaccatgctgttttggttactatagctccgcagtataatttgaagtcaggtaatgtgattctttcagttttgttgttttgactcaggatagctttgggtattctgagtcttttgcagttccatataaattttaagggatttttttctctatttttctgaagaatattactggtatttgatagacatgcattggacttgtagattgcattgggtagtatggacatcttaacaatattgattcttccaattcattaacatggaatattattccactttttgtgtcctctttaatttctttcattaatgttttgtagttttcatcgtagagagctttcacttccttagttaagttaatccttgggtatctaattttacttgtagctactgtaaataggattactattttttatttctttttcagattgttcagtgttggcatataggaatgccactgatttttgcatgttgattttgtatactgtgactttcctgaatgtgtttatcatttataataatttcatggtggagtctttaggtttttccaaatataagattatatcatctgcaaacaaggataatttgacttcttcctttccaatttggatgtcctttattgctttctcttgtatgattgcattaactgagacttctaatactatgttgaataactggtgaaagtggacatccttgtccagatattagaggaaagtcaactagtattttaaaatgagcacctgaagctgggcacagtttctcacacctgtagcctcagcactttaggaggccgaggaaagaggattgtttgagcctaggagttgaggaccagcctgggcaacacagtgagactaagtcactacaaacaagacaatattagctaggcatggtggcacgcacttttagtcttagttgcttggaaggtggacatgggaggatcacttgagcccaggaggtggaggctgtggtgagccatgatcatgccactgcattccagcctgggtgatagagtgagaccctgtctcagaaataaataaatacatacatatataagtaaatagataaaaataaaaatacctaaaattagcccatgaaatatagaacatttaaagttaagaaaaaacttctagttgaacccatgatgttaattgaggagatactatagagtgagaagaaaacaggtctgggggcagagtcatgaggaatcttcaattcttctgaagctttagaatacactgtagaagacaattagatttttaccatgaaatgtaaatatattttggtgaacagttcagagttgtttattcactaccattaaaaactttgcttatataaatatcgacttatccttctgaaattcttgagtagacgttatggccatgcaattttcttgacaatgctccatctgccacaaaaattggttaaacagtgttggttatagaaagggaaagcaaagggaataagaagcttcctgacagataagaggaagcatggaagggacaaacttcccagaacttgagtgaagagtgcttaaagaagaagaaagtcatcatcagtttcaaaagtggcaaagaagcgtagcaggctgaggatagaaaagagacttttgcaccttttaaaagaaagcttcagtgaagtggtggaggatgaagccaagtaaaagtggtttggagagggaatgattttaagtatcgtcaaatactacgggcagcgtgttattctttctttctttctttctttattttaattcttaagaggaatgatttgtattcaaccatttataggaatgaaaaaaatgttgcttatagatatagagtttcttaggtcaagacacatacacacacacaaacacacatgcaaatagagagagagcactctcatcaataactaatggcagctctaaaacatctggattgatagaaaaatgtggcagcattttcttttggccagaaggaaaagccaaaataatggttcaaaggagtaatctttccctttgcatcccttaaaacatcttccatgactatcatttacctttcttagagagaatgcctgtctatatatactttacaattatattttgttcatggatgaaggcaaaggaagggcaagttcaaaacagtacaaataggcctggtacagtggctcacacctttaatcacagcactttggcaggatgaggtgagaggttcagttgaggccaggagtttgagaccagcctaggcaatatagtgagaccctgtctctatgaaaaataaaagaaatttatccaggcatggtggtgcatgcctgtagttccagctacttgggaagctgagatggcaggataacttgagcctgggaggttgaggctgctgtgagctgagatcacgccactgcattacagcctgggcaacagagcatgaccctgtcttcaaaacaaaatgggaacaaaacacaacaacatgaaataaaatagaaattcaaaacagtaacgtttcataaaattaagaaaagagtactcatcaaaagcaggaagagttttctaagttaagggaaggtttaaaagtgataaagttgtaccaaagctgggtatgcatcaatatacgcactgttatcatacaattaaatatatgatgattagaggacagaattccgaggtgagcaggtatatattctacctgactgactttccaactgagcaaatgtttctcttggcctgaacacagaccttcatttattttcattgtgagtcattttcctagaagtcactgttgcataaatggtgcttccctgacttccgatcaactcagacagccaaaatcagtaagtgtacaaatgagctcaacaggaacattttttcccaagatatttcctgtcaattttctcatcctggaatgtgaaatggtcttttcctaaagatccccagatagtagtcatggaattaatctttattatctgtcagtattgtatttattactcatataaccctgtattccagatctcccttgaatgtggtgggaagatctcattcaccctgtgatctgacagcttgtgtttttccttctactcttttcacccaaaggcagaacctgaaaggatgccaagaacttctagagaaatgcagaaaaaaaattaaaaaccactacacaaacttgagggccagacagagatattagtacagccaaaaaacaaaagtattttgttattttattataaacatttcttattacattttatttctcataaaattacagaacaaggggtgagggcaaaagactgaattgttgactaaccaactctggaatgtactattattggtaactgctagtttcccattttgtgggcattggtagtaactaaaattttcagaataaccaataatttgactgagtttagttaattaaaaaaaactttagataggaagttaaaaacataagcagattggtgaaattgtgtgaactattgattcatttgaatcatacaatgcctgatttagaagcagcttcagagatcatgtctcaatcttattttacaaatgaagaaaatgggtcccaagggaccaaagggaatggcttgtccactgtcaaatactcatattattttaggcaaacatgtatctcttgccctataattaatctcaaacttaggaatatctctattctcacagagttcgagtctcagttacacagtaagaactggaaagtctactggtctgaatgattttgaatcacctaaatatcacctaatatttaccagagtgcctgacacataatcaatgcccagtgcttaaggtgtagttgagtgttgaatgaatgcattataataaaagctcttcaaaagaactgctatgaatcattgtcacatgatgtatttgctgaaggcagagctccttaactggtggggaggatcatcaatttggaaactgagggcatgcgctttcttttagatgctgcctaagacaaatgatgttacttcaaaatggtaaaaaaaaaaaaaattaaataaagaaaaaagtacatcataaataaaacagattgctaacaaattagtaattatgtcaaacaaataaagctgcccagtgttatgctttagcctcatttgacccttttcaaaaaattaaaaagagaaaaagaggaggcagaatgaggaaatacattaacccacagaggcatttctagctctgaatctccatctaatttgctttttacaaactattcagcataaattgtctctttcagcatattgaaggatgaaaacacatgctaataccaataaattggatctgagtttggaaaatttatgtgtgcatataaaaactatttgcatacatccccagatggagaagtcaacagagcatgaaccttagttgtgaggataacaatgtatacattacattgggagattcaatttgtgtgtaaaacaattcaactgctgattatgaaagtgacacattctaggatgatgcacctttaaattcagcagtaaacatgaatatggaactcttgctctttgccagcacaggtttccacatctggttcatttccacatatagcatcttaaggaatcaaaggtatattttatttagtagttgttaatcaactttaaaaataaatatcatacaaggtatttacagcatatagttttaagcaccctatagactgtgttacatgaatgataatgatgaaagcaaaatgcaaaacttgttaagaaccaagacgataggtcagtattctagctatgtgaccttggacatttatctaactttttttttttttttttttttttttttttgtgatggagtctcactctgtcgcccaggctggagtacagtggcatggtctcggctcactgcaacttccgcctcccaggttcaagtgattctcctgcctcagcctgccaagtagctgggactacaggcacttgccaccacgcctggctaattttttgtatttttagtagagatgggttttcaccgtgttagccagaatggtctcaatttcctgacctcatgatccacctgccttggcctcccaaagtgctgggattacaggcgtgagtgcccggcctatcaagccttttttcatgtaagttttatcagtttttcatggaagttacatcagtttgctaagctgtgcattggacataacaacgctatatatatatatatatatatataaagtatatatatataaagtatatatatattttcatgaggatctaatcagataatgtatatatataactcactatagcgtctagcaagcagttagctctcaataatcattatcattttcagtccttttttagaagctgttatgttaaaattgagtgctgtcttcattgggacttgcagtttcaaaatatggtattaggcatttgctcaatattgaaatccacgggcacgtcacacaggagagatagtgctgatagtctgaggtgaagctgattgtccagaaggctgaatgttactaattacataatagtgagtacaaacggaacacaggcacagagcaagaagagtccattgaaaagagagcctgatgctctttcccaagagaagacactgggaaaacaagttcaagccaattttaaaaccacaaggtcagagaatgcttttttgttgctgcctttttatttgttttcatccctgaatatatcctaagtgtttcatttaactttgtccttgccccaggtcccacccattcaatcacatttatgccctcaggtgaatgaagactagaggtaaaaaaggaagtagctaggttatgaaagattctgtaagattcttgggcacaaacagcactgcttctgtactttctttactgaaccgattacaaaagagagagagacatagttttgtctgtttcccgttgaccccacgtacccctggaatctgaaaggcacccctgtattagtggtctagctgctccccaagaagatggcagaggggctctggtgcttggtagggagaggtagacaggaataggagtggcagtgacaatgcccatttggagagctaagagtgccagacacatagcaagccctcaagaaatacttatttaagacttcctggttcctgcattgggttgaattttgtccctaaaaaagattactataactactaagcatcagtaattggaatgtaatttttttaagtacggtgttgctgatatagtcaagttaattcaatgactgatgtctttaaaagaaggagatttggcttgcagtaagttgagattgtgccactgcactccagcctgggtgacagagcgagactccatcaaaaaaaaaagaaaagaaaaaaaggagatttggatacagatgcataaacagaggaaggaaggtgaagtggcatataaagtggcagcgaagtggcaataaacagtggcaatgaaggtgaagattgcagtaatgtgtccttctacaagcaagggatgcctaagattgccagcaacggtgaaaagctaggaagacatgtggaatgattcttcccggactactcagagagcgcacaatcctgccaacactcgcacttcagatttctagtctccagaactataagagaatatgtttctgttttattagggcacccagtacatagggctttattatggcagcctgggaaactaatgcagtccccaaagaaaaagtattctgtgaatacctagcaaagtcaagggtgctcagtggggagttaaaacacctactagtagggtccatgctgcctggtgaaatggccatagctaatagcaaggcagagcttagcggaatctacagatagcagaatgtacaagatcttcctgctgttgtcatgggaagattgttcagaggagttaaaaatgcacttgccaagatgaccctcaaggggctgtgagtagggatttgaataaaaaggggatgatgagaagccttgtagggaactggtgtttatagataggtgaagacaaaatttgtctctcaatggccacatttttcagccctacatcgaggaggcctgaggacatccaggctacaataatatagaacagtttctccttgattatattaaaaaactgcattagattgtctcttcctgcatgagtctcttcagcttgtaaatgtttcagggtcacttgtcatccagaaatgtgccttttactaaaatgattatgccaactgttctatttaaaaggctcttgatcactgaacacagtgaaaagtaattcataaatgctgactcaagaaaaatgttttgataacaaaagttgccaaggcaagccagaatgaaagcattccttagccttaaattgaaaatagttaaaagacccatagtgaaaaacactaataacaaatcttcagaagctgatgataaacatacattagaagttatgattaaatacattttgactaaacaagatacatgaagctcttattacaaggcctggctctatgataggcaataagaatatttcatagcaatgagagtaagaaaaatattaatgatgagttgtgtaaatgtatatttttatatcgtgtttctgtggttgagtgatttgcagtaaatactgtcagctaataccaaaagcattataaaatgtgaggacagccttcacagttggttagaaaggtgacaagtgaagaacatgacacctaaaaacaactgctgcactcacgggatcaatttcagtaatttccaggtaaacccagttacattggtagaaagtaaagctatgggtacaaccataatcatagggtgtaccaaaaataacattactattttaatgctttgattaaccagggccaatgtgttctttacatgtattgacttaaccaaatttgcgttaccataaaacccatgagcacacagaagttagtaatgtggggtggatgttagagccatacattttagctctagagacctgcctttcatcagtacacatgctgctgttcagggtggaaacaggccagatgttaatgtcagtatatagctggtgtcatgaaagtcctccagaagttatcctgaaaattttaacagcttttatgacaacaataaacatgcagcttaccctttgaaaggcagcttgggccaggcacagtggctcacacctgtaatcccagcactttgggaggctgaggtgggtggatcacaaggtcaggagtttgaggccagccaggccaatatagtgaaaccccatctctactaaaaatgcaaaaatctgtcccagctacttgagaggctgaagcagaatagcttgaacccgggaggtggaggttgcagtgagccgagaccacaccattgcactccagactgggtgacagagtgagactccatctcaaaaaaaaaaaaaaaaaaaaggcagcttggtggatagtcatgagatagaaaattaaattaaacaacatcttttaaatgttttttaaaaaataaatttctgcaaagcagaaagtaaagatgaaaattagcaattttggccggtgcacatggcatgtgatggaaagattgtaagcaaacgttatgcagaaagacagtcttgcaggtatttagtttcagaaagatttgggaaaaggtagtgtttatttgttaaacaggcaaaaaagtgttttagtccttcgggaagaaaaataagaataaacaagaaagatctcaatttaatgagcatttacatgttcttagaaaggatttggcatgggtaggtggggtggtcaggatagaggctgagattatataaatgagatataaaataaggacctgaatttagaaacaaaaaacaagggtaggtacatgaatgattcaacaaagtgagtgagattcatatcattagaatttaatgcaagttaatgaggtagggcttcttaattcacttagtaaatatttttgataatttatagtgtgataatattctaatactaaaggcagattatttatcagagttactcaggtaagttctgctttaatgctgatccctcctagaggagttagaataacccttcctgccctagatgaccatgtgctaaacactaaaatctatgacatgtcaccttgcattgcaactggctactttgcagatgtgatttagttgaagatctggagaggggagggttatcttggatttttcagacaggtccaatgtaattacacaagggttattttaagacagaggcaggagggtcagattcagacatgtgatgatggaagcagagtttggaatgatgtggccaggagccaaggagtgcgggcagcctgtaggggctggagagacaagataaaagattctcccttacagccttcataaatgctacagacccattttggacttctgaccttctaaactgtaagataattattattttttgttttgaaccactaagttatggtggtgatttgttatagcagcaatagaaaatgaatacacctgcaaattttgattgtttggggaaaagggaagctgtataggcactgtactgagtacaggagttagagaaataaataatagttacagccatcaatgacctgataacataatgtgagataaaagttggattgtggtatggtggggaagtgtaagttggtttttatagtctaggtgactcaactatgtggagtggtggaatttatgaatacaattccaggcagatctataaattcagttatagtttaaggataagatgagtaatttttttttaaattaaaaaaactttaaaaatcaagaaattagtttaattgattttaataagctggacaagatatttctactcatgtccatctcatctaccataccatagtccaacctatcatgatgtctagcctgggctatcacaaaaatgtccttatgggggtcctcactcaaatctccactgacctagtccaaacaggctttgcagttatggtgaaaatgaccattttaaaattcaaatctgattttttaaactttcttgataagtatttttaatgccttgctactgccatttggacaatattccaaacccttaccttacctaaaaaggtcctccccgagctaaccctacttactatccgtataggtatcttgtcttcccatgacctgtctttcaggtcttcaaaagctccaagccctctcttttctcagagccctcctgcacactgtttttcccactccttaaaagaggatcccttccactttacacatatttaaaaataacaaatacttatagtgacagttacgattacttgatgtgtattacctctattaatcctctcaatagttccatttagtagatatcattatttttattttatggaaaaagatacagtggtacagaaaagctaagtaactagtccaaagtcacaaagctaataatatatctcagagtaggcagtcaatcctatgctgtatggttttagagtcctttaattgctaaaccagtatgccatactgccacatttctttgattgtcaacttagatatcattttacaagaaagccttcccataaccctaaccttgatagtgccttgccttccccttatgttatgctgaccacacatgatcacacaaggagaaaagggtgtctgagacctacaagtactctatactgaacctctctgagatattcttaaaattatagtaaagaaaactaggttagtaattcatttataacacctgaaaaaaatcaaaagcttcatctcttacagagttttcaccttgtctgactggactatttctcatgctggtggttatactgatctatatatatgtgatggactttcaaggtcatgggtatcagtaggtgtttgagttgagatttcaacacttcacatccctgctttatcattgattgcttcatacacatacaaaaacattttttcttggaaaacaaaatctgaaatttatatcagcctttatttagaggcaattcatatggagcactgttaatacaaatgtgatttttctatccctgaccctcttactaaccctgtgttgtccagggatccatgaactttgtacaaatcatggtagggaatcatctgtatccatttggagaaaacagagttctaactgtgtgttctgactcacaacttgaggttaagtggaaatagcttttgagtgtttaattctcatcccttctgattctgcagcattggaggaatgtccttcttaactctcagcttttcgtttgtttggtttcttttgctacaaagtgctggacagagactgcatgaggtactgagaatccagtaagcttaaatggggttgagaaaaaatggctcccagctttggattatgtcttctctcaactatgtttgtcttgtggactaccagctattttattttgttgtttttacaatgcaaatgtctttgttgccttttctgagttaaaaaagtaaatgcattgcaataacaaaaaaaaaaagctacgaaaataatcaagtaaaattcatttcgagtctcactttactagatgaccatagttaacattttgataaatttaagagagacaggcagatgtctctttctcttgtatgtgaatgtgtgtgcacatgtgtgtccatgtgtatgtgtacacatgctaccatggacatcttctctgtgtgtcttcctccaaatccttactctgccccaaaagtctgatctcaataggtgtccttggcctctagcttctagttagattggaacaattgaaaactccgaaaggaaggtagagggatgagagggctaaagattttatttctctagtcccatccttcttggcttacctgaagcaggttgtgtttgtctgtgaatactctctcaaaacaaatgtctccattagtctcttcatgtctgggttctggtaattactacctgctcccttacatcaggcctagaaattaaaagggctccacagaaactagctccagggtatgcactgttctttgtgtcccaatactgtgctcactcctttaaaaagtcctttcatcaaatactcttcaaattatcctattttgaatgtgccatctgtttcctgagggaactcttatggaaaatttcccctacaaaacatgcaaacgcatgcatgcgtgtgcgcacacagacacatacacacacaccccacatatttactggaatgggttgatgcctgcaactacatttttttatgatgtatcataattcgtttttctagtttcatcttggtagatatttagactattccgttttttatcataccataagcaatgacatcgttaatatcctcgtgtgtatattatgccaactttttgcaagattattttatagtacattcctaacaatggagtttctatgtcaaaggacatgtgcattttaaaatttgatactactttttttttttcctttcaaatggctccaccaatgtttattcctactatcttagtcagtttgagctgctataacaggaatacagagtggttggcttaaagaagatttttttctcgcaattctggatgctggagagtccaatctcaaggcagacgtggtgtgttcatagatggccatcttcttgctgtgtcttcacatagtggtaagagctctctggggtttctttaataagggcacccatcccattcatgaagtctccaccttcatgacctcatcacctcccaaaggcaccatcttctaccaccatcacattgagagttgggatttcaacagataaattttggagaaacataaacattcagtagtccactggacctatcaacatggtgaaaatttcagtctctcactagaacttcccgtactttattttatcgaacattttaatttttgctaatgtaaaatgtgagaaatgtcattaccgttttaattttttcttttaatatgagaaatattggacatggtttatatgtttatttagccatctgtatttcttttcctgagaagttcctattcacgtgctttactcagatgagttacaatatttattttcaagacagagtaggacctataggggaaagaaataagtaaccttaaagctctcttaactttactttaacagatatctaaaagtcatattaattcattgaactttgccttcaggcttctaagttgtgtatttctaactttaacatagttgacattccaggactgggagtcacagttgatagtacctctcattggtggaggctgccttcttcttcttagattgcatgatgatctcaactttacatactagtcaaaactttgtattgttattctcatattaggcttcaggttattgtcttgcatttcttgatcagtactttatatttctaaaatgagctttaatcgacatagatagtgaccatctttcctggccccaaccagttaattttacatgtgtatcaacataatacaagcaaggagaaactaaatatgtgaacagtggagtctatattcagaaatatctaaaaatgtatagaaaatgtgggcaatcctgataagttttaatcaatctgatacgtttgaattttattcaagttttcatgtgaactaagtaatggtttggagcaaaagggataacattatgcctttactaatgctcatagcttgattggaaggaaaaataaagttcatggaaatacgttaggaaggatttctgaagacctggttggtgatgcatttatttgactctgataaaaggatgatttaaagccgagcatggtggttcacacgtataatctcagtactttgggaggctgaggcgggtgaatcacttgagttcaggagttcgagacaagcctggccaacatagtgaaatgccgtctttactaaaaatacaaaaattattctggcatggtccgtgcacctgtaattctagctactcgggaagctgaggcacaagaatcccttgaacccgggaggtggaggttgcagtgagccgagattgtgccactacactccagactgggtgacagagtaagactctgtctcaaaaaaataaaataaaataaaaataaagatgatataaatgttagattctttatttacatatagacagatatgtagtgtgttgtggttcctctattattgtccagataattttaatctagagttactgactgttgcacctactgattctgttataaatcatgttgtttttccagaaaaactagatttagccatcctgggtaggatagtgttgtcctcctcagtgggaaaggaagtacgggaaataaaattagttggataccaaagaattactggtgaataactgtgttatttacagtctatgtattccatatgaggttctcaatgatcctctgagataaatattaccatcttcatttttaaatttaagaaactctttcaggatcacatgagataaaaaaaatgtagtgttagatttgaatcaagatctctatgacttcaaactccatgctattcctagtgtactagtagttctcaaactacatataatacagaacatattttttctttcctggcacagactaatacatggtccagctatgcatgattagtatgcagttcttgctgtgtgaaactcatcactcaagttcaagaaccccgaattggtctagaacccattcaagaagagtccactgaccacgggcttagctattgtgagaatgtccaattgctagaaaagttttttaaacttgtaatttttgtactaactgcattctggtaataaataacttgcagagctaccctagtctacacaccacgctctgggttgcattgtcctggaaaatactggggttttgttttgttttggagatggagtctgactctgttgcccaggttggagtgcagtggcatgacctcggctcactgcaccctccgtcttctgggttcaagcaattctcctgccttagcctcccaagtagctaggactacaggctcacactgccacgcccagttaattgtgtgtgtgtgtgtgtgtgtgtgtgtcttttagtagagacagggttccaccttgttgcccaggctggtctcaaactcctgagctcaggcactctgcccgcctcagcctcccaaagtgggattacaggcatgagccatggagcctggcctggaaaatactgttaaaaactactttatcatctgcatttgtaaaagaccacacattattattgaattaaaagtatggaagctagaattctgctattttggtgaagtaaacctaatacaaaatggtcattcatagcttttgtgggaagaaattattgcccgaggaatgtgcttgataagtaataaacatggaaaactctttgttctccattaggcagaggaaaactaatttcacagtttgttgtagctgaatgttcggcatttgtttctttattcttattctgtgttaaggatatttaatctttcccttggaaaactactttttatttaaaaagacatttttctcagtccatttgtaaataaagcaagtatactgaaatgattcagattcctgtggttcccatttacatctgatttccttcctggctgatcttccagtctacatgacttgattatcttcccaaattatcctgccaggaatattccacagggtttttcctatggaaactatattaaaccttttataatttagcaatgttggcactaacgtactttctccgaagtgcacttatctcgagaacattcttccatgaagatcatccaaaaagcactctagtgtcagcataagtgtcaacataagaatgatccctaggcatttgcagaaatgcctttaactaattaaaaagatgttttaatatttgtcttcaaattgtgactcttcaatatgtctgacctaaacaacatgcatatatagcaagcgccctcactttgaaaattattttctaactataatgatgcacactttctttcttttgtgagttttcctgttggtgatgaagaacaataaagaggagaatgctataaaacatcatatctttattaagatagtaagttttataataaatgtgttgccaggcacggtggctcatgcctgttatcccagcactttgggaggccgaggtgggtggatcacaaggtcaggagatcaagaccagcctggccaagatggtgaaaccccatctctactaaaaatataaaaaaagtagcagggcgtggtagtgggtgcctgtaatcccagctactcaggaggcagaggcagagaattgtttgaacccgggaggtagaggttgcagtgagctgagatcgcgccactgcactccagtctgggcaacagagcaagactctatctaaataaataaataaataaataaatagatgtatttattgctttttttggtgatcaccagagccattaatttttatttcttttgaaagttctaaatttggaatgcaagatgagttgagccattatctttgaggaagctgtaatcaaatattttaaatttgcctaaatcatcatttggactgattaatagtcgtgataagaaataagaaagatgtctgaaaccattatctaattagttaaatgatagggaaaaacagtaaaaaatgaaagaaaaatacccaagactaaccaaattccacatgctttatataagagaaatgctataatctctgttccatgtgggatattgtcgcctccttaaatggttggagaccatgcctatgtgagtgattctgtacagccaggtagagtgctaaaagatacttcccactgatttctactacggtatctgtatctaacctttaagtccgtattagtttcctagggataccataacaaagcatcacaaatggagtggtttaaaacaacatttattctttcacagttcctgagttctaaaagtccaaaattaaggtgttgtcagggtcatgctccctctgaaatctgtagggagaatccttctttgcttcttcctagctaccggtagttgccagcaacctttggtattatttggcttgcagctgcattactctaatcttcattttcattatcacacggcattctccctgtgtctgtcttcacataatcatctccaagggatgttagccatagtggattagcgaccactcttactccagtgtgaccttatcttaactaagtatatctgcgatgaccctgttttcaaataacatcatattccgaggtactgggagttaaaattcagcataccattttttctgaagacaatttcaacccataacaatgcctaaatggcatatttgtaatttcagataaacattctagtgaaacaaatgattctcactgttaaacatgtatttttaaaagactgtataatttccagaatgccaggttctttctttctattttctcccacttattacagcattatcaatctatgtgttctcatttcttctattcataagtcataaatgaccttgataaagcttgggtgattttcccaaggtaaaatttggggcaggggttatgagtagaaatttcactccacattgtatattgtttggacactttgctggccatattcattgtcctatttttattattaccaaaacactagaaggtactataataatgaagttacgcagatgtgaaaaacatgacttagttgtagtaaattaacttgtcctggagagatatatggatgagtcagtatccaaactgtaccatacaaccttttagttttctggaaccagggagaaagtgggaagagaaatagaagaaattacatatgacatgatagatagttcctcttcaacaaagtttgctgtgctacaatctaccaaagctgataatttaatgggccgctcaatgttgcctagagcacattaagtgtgacattttcttaatttatcattggtatatatgctggtaaattttgtttacatagtgatgaattgccttagtttaacatcttatatcggaattgaatgaggttaattgaggttccagagcacaggtaacgttagaagcttaaacaccaaaacctttaccctacctaaagcaatgaacatatagttgaatcaataaaaagaaaatgatttctgtgtaattccaactgtatattagtaattatttcaacaagctttattgactatctaatcaaaaaccatcaatatgtcaaagggtggttgtgctgcatagccttcataatagacagctgaggacacaatctatagccactatgtggcagtagtaacagatcaccacagcccttgatctccaaacacttttgcttccacctgacttcattgaatgtcacatgcaaatatgcatgctaccacatactgtggattattcatccccatttctccatagcaaaaaggttatctatcatttctcaaatatatgaaacatgcaatcccagaatctcacttaaggtttttcttggtgttgcccctaataccacttactgtatgctatggttttaatgtggcccccaaagttcatgtattgaaaacttgatcctctattcagtggtattgggaattgtgatttaatgggaggtttttgagtcatggaacatcacctttataagtgtcttggtgccattatcatgagagtgaatttcttataaaaggacaaatttggccttctcctgtgtgcactcatgctctctctctctctctctctcacaccctcttttgcctttctaccttctgctatgagacgatggggctctaatgtcttcaccagattccagtccctcaattctggacttcccagcctgtagaatcacaagccaataaaggtctgtttattgtaaattacccaatatgtaatattgtgttatagaaacagaaaatagattatggtactgcatttaccattcttctaataggaaacagtatactcaaattaagtaacttaagaaaactatttgcaaagctgtatgcagagtgtagggaatccacaatgtataatacagtattccaggaccagaaatagtggaacatcataaacacctggtggcttgaaggaacaaaggcaagggccagttagcagataatggagagtaaaaaagctgtgtgtagaaggccaaataatagattatgtgttcttcagttatgagacacaatcactcatgcagaattccatgggagagtaacagggaaaataaaactgtgggcttgttctcctctttgtctccaatcttctgttggccaagcccagacagcatctagaagacaaaggatgcaattcatgtggatcagccactcagggcacagagcagggtgggaaaagaagaaaaatatcttcaagggcaaaagggatgatcacgtacattttccaacaaggtaaagtatttccattgttatcagtgaaagtcaaggactcagactctatagagaaatatatgttctctccttctcagatttcccctaaccttaagccttaacaacatctacaacacagactctaagtgatcctgataagattgtccttcaaattttcttccacaaacatgctcccagaaagattgaaggaggttgcttgggctccatgtatatagtaatgcttttttcacaagccccaacatttaacagatcagcttttaaagagttcctcagagctactagtgttcctggtaagctctccaacctatctttcttgtcccctttaccccgtaattttcatctggtgtcaacaaattggctacagaccaatcccaagaaagtgacaacctacttttgacaaagagtccagcaacactaatcacattgggccttacgttcctatttatctcagtcactacaggaggtcaaacaccttcatctagatcctcattcctatgtggctttgcagagacactgttcggactcattgcccattcctaacctaagcaaaagcttttctccgtacctctgggacccctggtttgtcattggtgaaagtccttgtatcttccctttagcacacttgcattagttggaagcctttcaagagatgatttggttttctcgtatttctattttatctcagggcccagactcaatgtatttcctgatgctagcttatgtttccaggccattgtttatttttctactctctccatccctcttagaaacacctaacatcaggtattcctcactgacattatcagccatccttcattaaggaacacgtatattaacctctgtgttaacatgcatgtaatatataataaaccccattgaaggttttagtatatggcttgctgtctttgtgtctatactactcctgtttagcactttgacctcttaatcctttaacctcttcagttccaaccctctttatatctcaccatcacgaccagaattttcaccactgattacgccataattcctgacatgttaactatgccaattttaaatatcttgttctccatctattttttctatatttccagttcatttgctctactatctctatttccataattctctaacttcactaggactttcaactcacttatctactgtgttagctccattgtaattctggcatcatttttatccagagaaggttctatattccaacattatcatcactaacttgcatattctttcaaatcccttgacatctaccctccttgccgtgcatggcttttaccctgattgcacacaattccttgtgctcacactatacctctactcatacatccaaatgcaaccagagcagtacacacagccattctgacagtatcactttaaattcatgactacaaatctcatcaagtctcagcactgccaaacaatccctccatattatctaagtaaaatcacccgagcttatttctcctatctaatggtaaatttgcacccattgaccaacttctcctcattctcaccttttcctcctcttagtctctgataatcacagttttatgatatgaacttttttgcttttttagattccacatgtgattgaggtcatgaagtatctagtcatgaagtatacaaaagtgtctttctgcgtctggctcatttcacttaaaataatgttctccaaattcatatatgttgtgacaaattccaaagtttcttttttatgactgaataatattccatcatgcatacataccacattttctttgtacattgttgtggttttgttgtgttcccactcaaatctcatcttgaattgtagttcccataattcccatgagtcgtgggagggatgcagttgtaggtaattgagtcataggggtggtttcccccatgctgttctcatgatagtgagtgagttctcaagagatctgatggttttctaagcatctggcatttcccctgctggcactcattctctcccctggtgccctgtgaagaggtgccttccaccatgattgtaagtttcctgaggcctctccagccatgctgtggtcaattaacctcttttctttataaattacccagtctcagctatttcttcatggcagcatgagaacggactaatacatccatttacccattgttggacacttgggttgattttacgtcttggctattgtgaatatactgcagtaagcatgggagtgcagatatgttctcaatatactgttttcttttcctgtgagatccagcaatcccactactgggtatatatgcaaaagatcctcctttttttttttttttttttttttttttgagatggagtcttgctctgtcgcccaggctggagtgcagtggtgcaatcttggctcactgccacctccgcctcctgggttctagcaattctcctgcctcggccttctgaatagttggggctacaggtgaatgccaccatgcctggctaaatttttgtattttagtagaaacggggtttcaccgtgttagccaggatggtctcaatctcctcaccttgtgatctgcctgcctctgcctcccaaagtgctaggattacagatgtgaggcaccgtgcccggccaagatcctccttctttattgacctctttatgtttcattcccacaaaattctgccttcagatttgatcttttatctatccacatttattcttccaattatctcatctatccacatggctttaaacaccatatattcactgacgattcttaaattgtacatttctaaagtggacctccaccctgcatgtccaaaccaaaactgctttgtatttgctatcccatagtcaaatctctcctcttcttagaaaatattaacaccacttatttcgttttccaaacaaaattcttctctttctgttatctataaaaattgaaatcaaaattatgtctgttatatgttgttgacttaaaggaatggtgatgctcaattctgactactctgtgggaggtaagacgaaatcaagtgagcaaccaagattattacgttgaagtagaacaataatttttattttgagaatctgatatcaattttacatctagcttgttcctcaaaataccacacgaagaactaagaagcatggattacaatgaactatacagtcatataaagcataataattataaaaattataatatgcattttgtggagtcagatttgtatataagaggtaaaatatgataaccacttgttcagttattgtaacactgaatctatgttgccattgatttgagttttgttcttataggcccaagccatgcttcaaaggaataaaatatttcaccttgggtcttagttttacttccaaaggcaatcaaagcactgaagcatttatgaatgggttagaagtatcaatcatcaatcattgtcagaatcctatcaataataaaaataatcctcccaaaacgtatttttcttgaaatactattaaaattgaggcttatgtcaaaataacaggcatgaaaaataggcccacttctgaaactgtagaaaacaaatgcaacatgtcttactttgcaatggcaacaaaaaaatttattcagctgctggatgcaagggtcacttattctggtgatgcttagcacaaaaataatgaggctattacttttttagctttgcctctaatctaatcaacatggtcttgttttactctctcaggtgtcttattattagatcactaacattttcaaaaatgtttctacataaatatgaggtaaaagcaattcacccatagccacgaaacttcctagtttcaatctgtgagagacagtaatgaaagtttattagaagcattttcttctgttttatgactccatgactttgcatactaatagctgttataattggaatagaactatgctttagaagaaaacataaaagtatgcacaactttcatatttcaaagtagctctaggcaaaggaaatgaaaaatggcctagcaggtaagaatatgtattttaattctttcatatttcataaaaagtcacccagcacaaatctgtaagacagacctttggtaaatgttattttgttattttttggaatcatggattttggacttggataccttttcttgtagatgtgaatctgcatgtgatcagtaataagtggctctcaatgctgtgggctcctattctgtcatttacttcagtcagaatatactgggcacatgatgtgtgttcaacaataatttgccaattaccttatattttttacccaaaataaatttcaaccacagaaagtgatcaagtagatatttataaagcattagggacatattggaaactgtagattgtacactgatcaattacttttatattattttagaaatttttacttatctcaaaatgtattaaaatactcatctgtcctcttatttcatggatattaaatgtatgtatatttattaaatatcaaaattgagtctttgtaaaaaaagattaaagcttaataaagatcatagtcatatgcataaatgtcacaaatataaaacactcttcctctttttactacacccgtgttgacagatgttgaattatattcaagtcaactcatttactagcctttctgtgggctcttaatagttataaattattttgccaaatgtacaagattgcacttgcattgaagtagagtctaagatagaaaaagaggtgtacatttgagtatttcaagagttccaacaaatgtgcaaacacagttctctggtacttcagaagaattagaaatcatatccaattcaaggatattaagaaagtctttacgggggaggtagcaatgaagagaaacttgaaacagatagagtctcaccatctggcataagatggaaaaggcacattccagacagcaaaagacataaacacatcacttgaagtcattctcaaagaagggaaagtcatctttaaatatcacagtggagccaaggagagattaaaagtagttacatttctagagaggggcaaaaaatgacactttactcattagagcgaaatttgtcttaactgagattttgcagagaccttattttacttatctggtatctcttctttgactacagagacatttttttaacatgaatgactcatttgaaatctatacttggaaatgtcatattttctaagactcaacagggatttgctatatttttaaagattaatttctagaggaaagggtttttagatataaaaattaatcccctggcatactatacaaatacaaaaatcctttagtattcatgaaccttgtttctaattctgacatttctaccttccaagcttgcttctttaatcagagtagtgtgaacgtcctcagtatatcaccactgagttttaatagcaagtaaaaaaccaaaaactcttctgacctttagctgcagagtttatacctgagattcttgacaaatagctgccaactgatagattttttttttaatgtcatgtcagttttcattttcctgtgactatgtcttgggtaggcatggatattatccagattctaagctaaattgcattctattattaatagctttaatctgtttgtaatcatctcttattaatgtgatacattggatatactgagaatatagatttttccaagaaatatattgacaaagtgaaattcttctggaattgtttctacctacatatcccaccaacaactgaagtcaacaggcagtgacaccagcacttactctacaaagcttgcaatattgaatataattggtggattcaaaataattattttactgctgattatcctgagactacatactcctagccaaactgtgctaagagaagcactaattcttaacaatgttaaccagatttctaggtaacttggggaaaatactgcacatgtgattttttttaacagattccaaatgtaaattaacttacataaagaattgagaatttctgaagtttaatatgtcatttcacatgtaaaggggatggtatatgttaagatccttgctctcactatttccaataaagtattatagctatatatttttaaaatttgaatctcctgttccataaatcaatttatgaaggcactagtaacatatttacttagatgcagcttttaatctgtccaaagacttagaaatgagacaaaagaaagcataaccaacaaacaaaaaataaatataaaagttggtgtttgttctgaaaatctgcatgtcttaagtaatctttaagctctgtcaaagacagaacaacatcgaatacaatctgacttagaaatttaggagggatcatgaataacagaaatgtaaataaaatgcagataggagtgacaatattgagagttgtttaaaataatagggtagttttctgttgttgggcaagtaatgaaaaaataaatgaatatattttggttttctctcatatttgcacaaagaaaaattgaaaatatgcatatataactaatacaattcttatctgtataaagcaaggggcagtgtcagacacagtgaaaaggaacaagacttggggcaagacttcttgatgtctagattttctaatattttgatttttgaatcacatgaacgtttcaaattaaacttaaaagtaaaaggcaaaattgttattgcaaatagagtttctttagttgctcatagtagagacttcaaaattggattatgtaatgatgtgttctcctcactgtatagaagaacaatatatagagagaaggaaagtagaacaagacgaaactggcacagtgtttgtgagcaaacattgctaattgatagggaatgaacatgtaaaatacctgttcaatacaggagattttgcagtggttcattgcaaatggacagtcacatgcagacatagttgagagacctcacagaaggagaaaacagataatagaatcaataaagactgatgaaaattattctccttttccaatatttgagcagatatggttttgaactgatatcactcttaaaaaattggatgtaaaagatgaaccctcttcccaaaaggccgaaaatgcacatatatagatgcacaaaactattaaatacagacaatttagaagttaacacagatgtaagaggacgagcctccaaattttaatgggcaagatactgtgatccaaatagaacttggattaaatctcagtactgccactgatgactaacggaccttagataaattacttaatttctctgagcctcggttttcttatcttcaaaatggagataatgattcttgtgttaccagcataaggaacaaattcaacatatatgaaatattattattgttactataattataatggctgtcaaacagaattagaaactcaaaagctgggcaaagagatagtcttccctgtccctgtcagggtaactgatatgtcctccttcaacatactgcaattctattgatattcagaggtaagtactctgaatcattttgctaccactcacagattgtcttttcattttctcacccatatatctttcctcccaaaatagtttcagagaaactctagcatctttactccaatggtgttagacctaacttcatttgtttcaaggagagaaaactatagtgatcacacagtcagggaaggaatctcaagttttggggttttgtttctagtatagctttatggagtggctgatagtcttactatctaattagatgcttcaggcacatgccagctttgaaagtctggcagtagtttctaagggtgcaaagaacagtttgaggtgagaacatttgttgaggatgtcctattttgatttctataaaaatataattatatgaaatcataatatctgtgtccctggtagtgctaagatacggagcatgctaccaaagaacagccccctttacttgaaggagacagagagaaaaaattatatctccatgaaataatgcagtgattaatttaaaaagctgtctcctttctcttaccttttaaaccgtgaggggattttttttgtcctattacgataatatcagttctaacaagataaactcagtaaagcccactaagcattagtttatgcatgaacctttgcactctttgacccactttgtataagtatataaagagaaaatgaaaatgagtttgcaaatcatgcttagcataagtctgagaacttgcttactgtttgttattccattaggaattttatttgaattgttgcttcagtctcaccccacctctctgttggttttcaaagatgagttcagaatgattgaacttaatgtttaatggcttcaattgtgagggcagctaagtggctatatacttaaagaacaagagtaataaacatactttccttcatttgctgttctgccatactattagtctaccaaaaaaagtttaagttttaagtgacgagtaacaaattgatgacatgcactcttgactaattaggtgaatccctcattctatatggtacttgagctttaataagaaaaataatatcagcataataacaataacctgatattatccatttaaagtatctacttcactgccattgaatatagcaattaggaggacaggtcctaatgacaatatttagctagtaccgtttcagtgatataaacctttcaaatctgctcatcatcacctcttcttcctgagaataactttttttctcagtattaattaactattccaaaacttagtaagcttctcattcaccttattcagttagttttgcttactaataatcataacccattctcttttcagaatacaattcatagatttgctgtatagatttgctttctcaccctccagctgctctcaattcagttccagtcagtttgagattattggatttagtgaggaggctacactctgaatctcatcttttccctaaggcactcaaagcctttctagccctttttctttctctctctttcttttctttctttctttcttttttttttttaacaacttaaggccttaaaatactttgtttttgcaaaatttcagcagccataatttctatactatgatcttgtatttcttcatgcatcctggccaatcctctcctggctcatctccttcaggcaacatgaaagtgtgttttttcaaattctaattctattaaaagaggaagaacctctgccttctagactaccataagcaagtgttttatcaaatgttttacactgcataacataaatcagcatttttttcagccttctatattagttttcctaggccaacactgtatattttatgttgtgttacatcatcactccaattctagtacaaatttgtcttctgatgaggttaacttaggctatgctgagataacgactctgaaaattcagtggctaaatgcatgaatattttattacgtgtcttgctccgtcctgctctgtgtgtcacagggctttactgctcaaagtcacttggttttccaggataaagaaagctcttccgtgacccagctgttgtaccattagaaacattcagtttctttgggattttcaacagaacacagggtgtagtgaattgatattgtttttctgtgactcagcctataaatgacatatgtcacttttgcttatggtgccttgatctggactagttccttggccccgtgtaactgaaagacagctgagttacatagaaggagaagggtatgtggctattaattgagaagtaactacttgctgcactatagaaggagaaggatatgtggctattgagcagtaactacttgctacactataggtaaaaataccttgatcaactactttataatttttttcacataagattcctttggcttcctagatctcacgagttgattatacctcctttactattttattaaaattctatttgaatttttaaaattccttataatcccttatattcaatccaatatacatttaatttctctcattgataaaagcctggtcataactctgaccattttttaaatgctttgatatctatagttataggagaaaataactgataaaagattaaatattagatatatacaggtaaaggaaatacggaaccacagtttctaagcctcgaagtaatgaaatgacaatagctctaatcagcctctttgaaatatgaacacagagaaatgcatgttgacaatggttaataaagtttcgtgtcaataatagattatgatttttaaaaatattttaaactttgcattccaaccaaaggcatttacataaaaaagtagaagtataatcatctctgcaatccatacataattatataatggtcatgaccatgccatagatgatatagatggattcacatgccaatctgaacttagaaaacaagtttttttgcagaaaggaaaaggtgttcaagatgatactgctcagagctggcagatgactttgaatctactccccaaatttaatatctcagatgttgatgtgggaggagcacagtgaaatttttagcactcagcaactttgaagaatgaagttctcggaatgattaagcattctaattaatatatatggcatagatatcatgtgtggaataccagttttttagagaactgaaatagtatagaatctatttttaagtaatatcaaataatttagtatttatttgattactcagaagacacatgaggttctcaaagaatctgcataaataaattttagttattattctgaagatttagaaaaacatagtttaaaaaatattttcagtaattaaaaggtgtcattttttatggtataatgcagtccacagctcacattctaacagtgtctcttacttgctaaatattataagcaatttactctctctaagcatctttcattatcattacaatcattaactctttcataatattatctggaaaattctcagagtgaattccatggttatagtagagtaacatttagactgtttatctgttaatattaatttattctgagttgttctatttaaggtctgcttaatgaaactactttaggtatttttttgaaccaggaagtgggtaatcgggtgtagcacatacaattcagtgagtctgagtctgttgaaacttatagcatttaaggtctactgtgttctgacttatatctgtgtctcccagtatatctacagtacctatctgtgttagttcattgtcacactgctataaagaactacctgagactgtgtagtttataaagaaaagaggtttaattggctcacagttccacaggatgtgtaggaagcatggttgtggagacctcaggaaacttataatcacggcagaggtcaaaggggatgcaggcacaatctttacatggtgaagcagaagacagagagcaaagggggaagtgctacatacttttaaacaaccagatctcatgagaacacactatcaagagacaagtaaggtggaagtgcatccccatgatccaattgcctcccaccaagtccctcctccaacactgggaattacaatttgacatgagatttggatgggaacacagagacaaaccatgttattctacccctggcacgttccaaatctcatgtccttctcacatttcaaaacacaatcatgccttcccagcagttccccaatgtcttaactcattctggcattaactcaaagttcaagtccaaagtctcatctgagacaaggcaagtccctttcacctatgagcttgtacaggcacaaacaagttagttactccaaagatacactggggatacaggcactgggtgaatagatctgttccaagagagataaatcagccaaaacaaaggggccccaggccccatgcaagtccaaaacccagcagagcagtcattaaatctcaaagctctgaaataatctcctttgacaccatgactcacatccagggcatgctgaagcaaggagtgggctcctaaggtcctgggaagctccacccttgcagttctgcagggtaaagaccctgtggctgctttcatgagttggcattgactgcctgcagcttttccaggttcacagtgcaagctgtacatgcatctaccattctggggttggaggagagtagccctcttctcacagctccaccaggcagtgccccactggggactctatgtgggggctccaaccccacatttcccttgtgcactttcctagtagaagttcctcatgagggttccattcctgcagcaggcttctgcctgatcatccatgtgtttctatacatcctctgaaattgagatggaggctcccaaatctcaactcttgccttctgcacacccacaggtctaacatcatatggaagccaccagggcttggggcttgcaccctctgaagccatggcctgagctatattttggccccatttagacacagctggatctggagctgctaggatgcagggcacgatgtcttgaagctgcacagagcagcggggcattgggtctgacccatgaaaccatgtttccttcttagacctctgggactgtgatgggaatgtcttccatgaaggtatctgaaatgccttggaggcattttcctcattgtcttgtcaataatagattatgacattattccattgatatgatatgactattaatattcgaatcctctttaattatgtaaatttttcagctggttgaattcctcctcagaaaatgggtttttcttttctactgcatggccaggctgcaaattttcccaactattatgctctgcttccctgttaaatatgtttcactttcaggtgatttttctgtttgttcaaatgagtataggcttttagaagcagccaggacacatcttgaacacttttctgtttagaaatttcttctgccagatatccttaatcttttaatctcaagttcaaagttccacagattcctagagcagtggcacaatgactccagtctctttgctaaagcatagcaagagtgaactttactccagttcccagtaagttcttcatcttcatctgagatctcatcagcctggacttcactgttcatatcaacatcagcattttggtcaaaaccatttaacaagtttctaggaagttctaaactttccaacatattcctctcttcttctgagccctccaaactgttccagcctctgctcagttccaaaggtgtttccacattttcaggtatctttatagcaatgcgccacttctgggacaccaattttctgtattagtccattgtcacaatgctataaagaactacctgagactgggtaatttataaagaaaagaggtttaattggctcacagttccacaggctgtataggatgcatggctggggagacctcaggaaacttacaatcatgtcagaaggcaaagcggaaggaagcaggcacaatgtttacacggaagagcagcaaagggggaaacacacttttaaacaactagatctcctgataattcagtcactactatgagaacagcaaggctgaaatctgcccccacgattcagccacctcccaccaggtcctcccctaacagagattactagaggctggaaagtgcaggaggaaaggagagataaagagagatttgttaaaggatataaaattgcaactagacaataagttctagtattctatagcactggagaatgactattagacatgacaattagacataagatttggatgggaacacaaagccaaaccataccgccatctaaatgcactctccacttgaggtgacagatttttacttttaatatattctgtggctgtctcgtgttcacattgtcattttcaaatacttcctttcaaccagactttttcgtcttcttcccctgtcttctccacctcatggagttctaaggcttatctctaacatcaggtcctccaagatcctgctgagtcactcacattggatggttaaacactgcagtgttccaagtaaaatcttcaggtattaaacagcaagatgaacaagacaaagtccctgtctttgggaaatccaggtgttgtagaggctggtacagaattaattttaatacaaagtagtgactaatgagaaaatgtgcaaaaaatgttatccattacttatccaaactcccaaagtaatgccagtgccccttctgtggcaataatgttactcagtaggaaaatacagtggaaagagaaacctaactgaagttttaagttattttttattgatgcataataagtgtacacattttgggagtacatgtgataatttaatacattcatataatttgcacaaatcaaattaatgcacttgggatgtcaataaccttaaatgtttgcttttctttatgcttgaaacatctaaattattcttttctagctattttgaaatacacaatagattgttataaactatagttacctcacttatgtatggaatactaggtcttattgcttctatcaaactctaagaacaactataaagcttctgcacagcaaaggaaacaatcaacagagagaaaagacaacctgcagaatggaagaaaatatttgcaaatgactcgcctgacagggaatttatatccagagtacacaaggaactgaaccatctgaccggccaaaaaaaaaaaaaaaaaaaaaaaaaaagaaaaaaagaaaaggatagagaaagaaaaaggaaaaaacaacaatccaatttaaaaaatgagcaaattatctgaaaagatatttctaaatagaagacacaaaaatggtcaaaaatatatgaaaacatatttaacaacattaatcatcaggcaagtgcagatcaaaatggcaatctcattccagttagtatgactgttatcaaaaagagaaacaaaaacaaatgcttgtgagaatgaggaaaaccatttctagtacaattaatatggagaataatatgaaggttcctcaaaaatctacaaatagaactaccatatgatccagaatctcaattctgggaatctatccaaaggaaagaaaatcattatgtcaaagaaacatctgtgtctccaagtttattgcagtagtagtacagtcacagtagccaaaacatggaatcaaactatatgtccaacaatagctgaataaataaagaaactgtggtatatatacacaatgaaataccattcagctataaaaaagaatgaaatcttgtcatttgcaccaacatggatggagctatgggatgttatgttaaatgaaataagccaggaacagaaagttaaatgtcacaggtttccactcatatgtgtaagttcaaaaacagttgatctcatagaagtaaaaggtagaacagaggatattggaggctgagaagtgtagggggaaaagagagatatggggggggatttgttaaaagatataaaattacaactagacaataaattctagtgttctataacactgtaggatgactatagttaacaggaatatattatggagtttccagcagctggaaggaggatattgaacattcccaacatatattatatatattatatatatatgttgaaatatcactatgtatcacatgaatgaacaattattcaatgaattgttcactcattgaatgaacaattattgtttgtcaatttaaaaataaaatttaaaaaggtcaaactcaaaaaaaaaaaaccctgaattttaatacaagattttgcacttacttgttgtgacattggggaaaatacttaaattgtaaaatctcttaggtttaaaaaattttgttggtttaggtgtagagttcagcagtgtttagtgcattcacatggttttgcaacgagtctccatagctctttttatcttgcagacttataatttgtattaattatgaaaataatagcatttacaagattttctgagaattaaaaatgatgacatataaaatacctaattcagaacctggcacatagacactgttcaaatggcagctatttttgtttttctgtacttctgtgatgagatgatattgttctctgagtggacctatctcagatatatatcaaatagaagtttttgtggtactttgcccagtgtattaacagcaggtaccttgcagatactctgttacagtgaatgtatagatagctgcatagggagaaaagcagatggataaataaaggtaaggtttttaagaatgcttgaagcagatgtctcaaaccagtaatgttgccaaaagaagggaccaatgagaaatacattagaaagcaggcatattgcacagattttggaactgaagcatgatgaatgaaagggagttctgaagccaggtcttattttactattatatttctcacaaaacaaacacatacacaaacaagattattaaattacagacattgaggagttaaccagtgtcacatagtagattgatattcaaatacaacacaactacttatttctagaaaaatctcaccccattgctgcttcatctgatatattaagttttgtactattgaaaaaattcacaattttgactgttttttacacatgactattaaaggcatctaaaaagaatgttaattggtaccatttcttctcttcagagtattgaatacaaaggaaatagcaaacacaagtaattaattcttcctcttccattcttaataataccattgaaattaaagcaaaggaaaaagcttttaggaaatctcttggcttaaaatgcttcacagaactccaaataagacttacacatggggactattcagcttctgcccaaattatttaattgtatcttggggccttagtgtattaaaaaatgtaacaaggaggtggagatagatcataaaatctgtattttaaagaaatctctagctctaagtaaatgaagggaacagggaatcaattacacttgagtatgtaatttgaataaatgaaaatgccagaatgactgaagcttatttattcaggatgatagtactagtctgagagtgggtgactgcattttaataatatgaatactggaggagaacaaaaaaaaaagaataagagagagagtgacataaaatagaagttatactaagctgtaactattttgaaataaagaattggtatacagttacacaaaagacattatgaatgaaaaatttatgactccctctcatagagttgaaacaacctaaaatgaaaaatttaggattgtctctgatagagttgaaacaatctaaaaatgaaaacgtgtcactttgtatgtcactttttaaagagatatatttatatattgacatcatgaacaacgggtaacaatgcattatcaaattaatgggttatttcatgtgaaactgaaaagtaattataccctttaattttaatttaatttttatttacacttcccaaaatttgtagataaacatcactgacaataccttaacatgcacacaaacccacatgcccatatatgcacatgcacagatgcacacacagttgcaggaggacattactgagttacagcaaatgtagaactattactgtatttgagataaatttagccctgggaatcctgaaggccaaggtcaaaaggaaattttgaaaaatcacctggctttcattgcttaataaaagaaagctgtgatattgtgatataataagaaatatattcttgatctccgccccctagtttctgacacagacctcctaggaactttgtaatttcctgagtaataggaacatctgacacagagctcctaaatcccttgaaatttcctgggtgatagccccttttgttctaatgaggtgactcttgctaagctcttggattgcctcaggataaaggctggttgtcaggaaaaccaaccacttgattaaagggttggaaattttagccccaccccaaactctgagaaagaaagagaggctgaagtttgagatattcatcaatggccaatgatttgattgaccatgcctacaaaacagcctccatagaaacgcaaaaggattgggcttgggagcttctggattgctaaatgtggagatttctggagggtggcacacctggagagggcatatcacatatttggtcctatgcatcccttcacctgggttttcatttgtataatttttgatattctttatactaaataagtaaatctatggaaaatgtttccctacgttctctgagccactctagcaaattaatcgaacctgaggaggaaatcacaggaacccccgatttgtggttggtattaccagttgttaataagtataggtgacaacctactactttaaactggcatctgaagtggggggagtctggtgggactgagccctgaacctgtggaatctaacgctatctctatgtagattgtgtcagaatggaattgaattagaggacacccagctagtgtctgctgtagaattgtgtggctgttgtgtgagcgtaggaaaaaacaaaagtgtttttcccccccatattcctattagaggcatcacagatatttcctggtataaattaaataaagacatattaatgttattgttatataaaagaattggagcaagataataagcacacttttgaaaatgcctttgaaacatatatgtttgacataaaacttaaaggaaaaaaaagactcagtaaaaaagtagttggaaaaaaaagtaattggataattttacccacagacagggaaggttgagtggttagaaataatgtgacaatagacctgaactacagagtaacggatctgttttagggaacaatgaaaagagtccttaatttactttacatactgaaagccgtcttgtttttaaattattttgtaacttaagtattttatttaaaaacaaaattggctgggtgctgtggcccatgcctgtaatcccaacactttgggagccgaggtggcacctcacttgagccctggagttgaagaccagcctgggcaacatggtgaccctgtctctacagaaaaaaaaaaaaattacaaaaaaatggccaggtgtggcatcattcgcctgtggtcttagcaactcaggagagtgaggtgggaggattgcttgagcccaggaggttgaagctgcagtgggctgtgatcatgccactgcactccagccttggtgacagagtgagaccatgtctcaaaataaataaataaatacaaaataaatcccgtaggaataatcaaaagatgtgcaatgcaaaagtttgtaaagcagagtatggtagccatagaacaaaagagagaaatcctgccatgaaaaattcagaggctattctgctatgaaaccaaagtattttggcaatatgctgtaatttacaaggaattataggcgataattcactaaggatcaacatgacagctgctactttgggaagtctattatttttctcttcaatgccagggtgttttatgaagatgcacagatagaactataataggactctatgatttaggtttgatttataatctttggatgtgaatgttcattatgtgttgtctcttttaatgaaattgctacctttaaacttaaagtacttatgaaatggtgtgaagaagcccagggaaggctaaggcaaatttttagtaaacacttttataagtattaaaggtattgtaatgtagtatcatggcagtaacaattaaaagggagattacatgtaaacatatttttttgtattggttctaccatttagagctagaatttcctttataacattccatgtattcataattattttattcattcaataaatatttatggagtatcaaactctgtctaccactaatgcagacatcagggatataattgtgagtaaaacagacaaaaattcctatccacatgagtcttttgttccaaaaagggagacatgcaataaacaaggcagagatgtaaaatatgttgagtgataaatgtaggtaaataaaggaggggtgagggataggaagcctcagagtgtgtagaaaaaaggctaactaaaaaagtgatatctagtcgggtgctggtaatcccagcactttgggaggctgaggaaggtggatcgcctgaggtcaggttcgagaccagctgaccaacatgcagaaaccccgtctctactaaaaatacaaaattagctgggtgtggtggtgcatgcctctaatgccagctacttaggagaccgaggcaggagaatcgcttgaacccaggaggtggaggttgtggtgagaaaagatcgcacctttgctctccagcctgggcaacaaaagcaaaactccatctcaaaaaaaaaaaaaaaaaaaaaaaaagatgtatgtgtgaaaacctgaaggaagtgaaggaaccagccatgcagatattcagcagaaaagcattccaaagaaaggaaatagcagtgcagtctctccactgtaccatacagaaagtgccgtttttgttttattttattttttacatgatccacaatgcctaacaatgtatctggcacaggtgcttagtatgtatttgttgaaataaaaatactgatattaataacgcttttcatcttactacctcctacttttacctcaattcaaacactacatacataaggaagtcttcaccaacctctctcattttgttaggtctttcattttatgcactcagagcagtgcatgtactttcctcacaaacatgtatcataattagaagtgaatttgatttgatgagtgtttatcaaactttcctagacatctggttttacacatcatgatatccctagtggctagtgcttgacatatagcagatgcccaataaatgtctactgaaccaatgcatgaaaacaatgttctcatgatttcctaaatatttacatctagcttgcatccaaatttacacagaaaatagaggccagctgactggaatacttcatctgcatagcgtctacatctgtacccatactctttctttcatcttgcaaaagggagcttccatccatagatgcttctatgttacgacagcaatgatgatggcaatgatgatgagtaaagtttatttggcactcacaatgtgccaggctcttctcactttttcagaaaacttacatgatttctcttacataattatgcactctcttaactcgattagcttttaaatattcccatttatctctcattaaaaatcaaataaaaccctcaattaagcccacacatttttcagatattgccttatttatttcatccaaagttaaatatctcaaaatagtttaaggagcttagagagtgatctcctacttctccaacctcaattctcttcaatttgcatctatcagaactgctcagtttaagtcgccaatggctttcatcacattaaaataaatagctatttttcttttttttattattattatactttaagttttagggtacatgtgcacaatgtgcaggttagttacataggtatacatgtgccatgctggtgtgctgcacccattaacttgtcatttagcattaggtatatctcctaatgctatccctccccactccccccaccccacaacagtccccagagtgtgatgttccccttcctgtgtccatgtgttctcactgttcaattcccatctatgagtgagaacatgcagtgtttggttttttgcccttgcgatagtttactgagaatgatgatttccaatttcatccatgtccctacaaaggacatgaactcatcattttttatggctgcatagtattccatggtgtatatgtgccacattttcttaatccagtctatcattgttggacatttgggttggttccaagtctttgctattgtgaatagtgccacaataaacatacgtgtgcatgtgtctttatagtcctttgggtatatacccagtaatgggatggctgggtcaaatggtatttctagttctagatccctgaggaatcgccacactgacttccacaatggttgaactagtttacagtcccactaacagtgtaaaagtgttcctatttctccacatcctctccagcacctgttgtttcctgactttttaatgattgccattctaactggtgtgagatggtatctcattgtggttttgatttgcatttctctgatggccagtgatgatgagcattttttcatgtgtcttttggctgcaaaaatgtcttcttttgagaagtgtctgttcatatcctttgcccactttttgatggggttgtttgtttttttcttgtaaatttgtttgagttcattgtagattctggatattagccctttgtcagatgagtaggttgcaaaaattttctcccattttgtaggttgcctgttcactctgatggtagtttcttttgctgtgcagaagctctttagtttaattagatcccatttgtcaattttggcttttgttgccactatttttctatccaaatcttacctcttcttttgctgaaatgtttttcttaccaggagtgatgaaaaatgtctctgtccctgcctctgtaacataaaattcttttagtttccctcttgtatctcaggttcctcgttcatggactgatttggacttacttacctggcaattgaatgttgaaatgcttcaggcaggactcattctcattgcctggaaatttgctattatctatgttatttttcaaagatattttatctatgtccatattaactattaatattcatacatgaatgactcacaaaattctattctttatgcagatttatcttctaagattttaggcccatatttcaaaatgtctactcaacatctcatctcaaatgatttatgacaccttagacttgacatatctgaaatcaaactcagatttttacaatcaaaacttggtttattccaaggatttcttatatcactgaatagtagcattatccatccagttattccagacagaatcttgagaataattgctgagatatttgttattcttacaatcatttctcagtgtccctttttttctcaatttagagactatatttttaatacttttaaattcacagcaaaattaagagtaaggtacagagatttcccatttatctccctggcccacatggataggttccatgattattaaaattcccctccagggttgtaaatttgttatagttgatggacctatattgacacctccctatcacccaaagaccatagttaacattagggttcactcttggtgttgtatattttataggtctgaagaaatatgtaataatatttatccaccattacagtatcatacaaactagttccactgccctaaaaatcctctgtgatcctcttatgcaccatttcctgtctggtaatctccagtaactactctactttttattgtctctatagttcttacttttccaggatgtcatatggttggcatcatacatgctgtaacctttatagattgacttattttatttagtaatatgcatttaagtttcctttatgtgttttcatgacttcacagttcttttcttttagcactgaattatttttcattgtctggatatgccacagattatttctctattcacccactgaaggacatcttggttacttccaatatgtggtaattataaataaaaatgctataaacattcatttacaggcttttgagtggacataagttttcaactcttttgagtaaataacaaagcgacgggttgttggatcatagggtaagagtatatttagttttgtaagaaacagacaaaatgtctcccaaagtggctgttcctttgcatccgtgctagcagtgaatgagagttcctgttgctccacatcctcaccagcatttgatgctgtatgtgttctagattttagccattctaataggtctgcagtggcatctcattgttgtttgaatttgcattttccttatgacacatgatgtgtaacatattttcatatgcttatttgccttctatatatcttctttggtcaggtgtctgttaagatcactggctcaatttttaattgtttgttttcttactgttgagttttaagagttacctgtatattttggataaaagtcaatatcactttaaaaattcatcttgaatttatctatttatatctgtctataccaaggcaatagtaactcttacctgaaacactcaaacagcttttaaagcagtaaatctgcacctacacttgcctttctcctccaaagggctcagcttcagaagatgttatattttgctatcgaaacacattagtgattttccactgcattttagcataaaggcaaatttccttaatgagaccaaggagggttgcagtctgagttctacattttagtctagtttcattccataacccacattctgtctgaatttctttttaccatgtcggccttctttcatgttcattgatctttactctgcctctgagcctttgtacaggcatttctaaatgcatgaagtatttgttcacaattttcactgtggtagatacttacatggtggtcattcataaaccatgctgctgaaactcacatcagtttgtagccctttcctacactgattctgggtgtaacttgctttgacaaatggaatattagcaagctaaggctgatactttcttgtatattagagcatgcagtatttgcaccctttttgaggtacatagcaccatgctgtaaggaagcattggctaggttactgaatagtagggacaccacatgaacagagagatcataaggaagagcactaattcatgaaactcatgagtgaaggcttcttggaccatctaaccaaaatagcactgccagctaaatgcagtttattttctccaatcaatattacatgaaaacataacaaactttatagccatgtttctggacacacataatcacgaaaaatagtttcttattatttcaaattaccagggctttaaaaaaattgttgttctgttgttcatgtggaaagtgtgtgtttgttacacagcaatagacaatattcacctagtaaacaaatacttatattttatagcaaaatctaatcagggaagaagattccttgagttaacagatcactaaatataataataatatataataattataattatcaaataatatattagactatattatactaatattaatataatatacaacacataacataattatacataatataattattatatagaattatatataatataataaatgtaatattcaaatgcataatactaatatatattataatatatactgtatatattacatatattattataatattcctgataatatatgttatacattatatattaatattgcaatatagattaatataagtaatatatcacatatgtaattacatatttaacatattcaattgcatatgtaacacatgtaattataatataatatataatataataacaacaataatactcagtactaattcagtatttactatgtacatggcaatattctaagtactccccatacattaccctacttaatctttgaagcagtgccatatgatgggtactaacatcagccccattttacagataaggaaagccgaagcacagaggtaaatgttagttacctattaactcttgcttataatctccattcctgtagcaaattcccattatcacattatttatcaaaattctagctatacattgttggggaaggcagctcacacatgcattctttggacaccctctctgctgtacaagaataggctttggacctggtacacattcttaccaagaaattgaatcctttcagcctgtgttggccttatcaacttgcatgatgtatggtaaatatttctgaattttctgtatattatgatgttttgacaccttaaaaatcctttttcactgaaagagattacccttcccagatctacccaattcttaggtataaaagggctcagcctggagtatgtctttgatatgcaaactaaccaagccagagtcatatcttctgtatctgggctgtataccccagaagacaatattcctctgcctaaatcttccagagccaggtaccaggtaactagagaccacccctacagatgaaagcctaccaaaattattcagactaaccagtcttaaactattcaccctgccctgccttgcctttgccatggaaattccaataaaggcagtagcctaaaccttccccttactcctgtcttctgcctcttgtttgccctagtgtctttcccatgtggtcctacatggaatgctgtgcctcatgtctctaggacccgtgagtataatagtcccttaattttatatgcttctccaagtataatttttacaacatgttggagttttacttaaacaccccaaaaaaagtttcttccccatttactacacatatctttctatgtttcaggctcaatatgtactcctttgctcctgcttaagcatgtgtgtcatatggcacctgggcaaccccactactatatctgtcccctgcgacgagggtatgatattcttctgttgcagcacaagaggtattcatgcaggccaatcaccaagtgttggctatcagaggaacctgctggacagagaggactgactcctgctacgaaagctgaagctactctgcctctttatgagtaaagggtggtttcatccagtacttgactgtttttctcctcaatgattctggtatcaagatgcagtgggcaaaagtgctcagactcctactcctgataatagttaacagatgtcacttgctcgacgtacatgtaattgtatgattattcaattaattttaatttctcccaatataccaaaaaatcaaggaggaaataggtcatgactatttttcactgcattttatcaccaatacctatttatgctagattataatttttttttttgagacagagtctcattctgtcacccagactggagtgcagtggcgcgatcttggctcaccgcaagccccgtctcctgggtcacgccattctgctgcctcagtctcccgagtagctgggactacaggcaccagccaccgcgcccggctaattttttgtttgtttgtttttagtagagacgggtttcaccgtgttagccaggatggtgtcgatctcctgacctcgtgatccacctgcctcggcctcccaaagcgctgggattacaggcgtgagccacggcacccggcccagaaaagattttaaaatgggtaaaaatgtatatagaaataagctaatgatactatggctgcccttgcaacatttcattatcttgacaaagtgcttggttttagtagtaattgggtatcaaaaatgaatccatgtaactgcacaggggtacactggaaccaacacctgtgtatgaagatgggacccatgaatatttaaaaagatatatattagaaatatctacctgacagcaaagagatacatgaggaaatttgactgtctcagcctggctgtccatagtaaaaatatgtcacttgtaaatctaagtcacatccctgctcttacctagatttgtgagatttttctaaatttttaaattaaaatgatgggtacatagcaggtatacatatttatggggtactttatggggtacatgagatactttgatacagacatgcaatgcagagtaatcacatcatgttaagggggtacccatctcctaatgcatttatccttggattgtgtgatcaacaatccaattatattattttaattatttttaaatatacacttagattattattgaaagttgtactaaaaaatactaggtcttattcattcgttctaactacttttgtacccattaatcatttccacttctccagtaaccaacaccctacccttcccagcctctaataaccatccttctactttctataagttcaattgttttaatttttggcacctgcaaatcatgagaacatgggcagtttgtctttctgtatctggtttattttacttaacagaatgacctccagtttcatccatgttgtcacaaatgacaggatctcagtttttcttatgaatcaatattactccattatgtatatgaaccagtttctttatccacttatctgttggtggacacataggttttttacaaatcttggttattgtgaatagtgctgcaataaacatgggagtgcatatatctcttccatctactattttcctttcttttgggtatatgcttggcaatgagattgctggatcttacggtagctctatttttagctttttggggaacctttaaactcttcaccatagtgattatactaatttatattcccaccaatagtgtacaggggttcccttttctccatatcctctccagcatttgttattgccgatattttggataaaagccactttaactggggtaagataatatcttattataactttgatttggatttttctgatgaccaacaattttgagcatttttatatacttatttgccatttgtatgtgtttttttgagaagtgtcttattaaggtcatttgaccattttttaatcagatttttagatattttactatagagttgtttgagcttcttatatattctggctattaatcccttgtcagagagttattttaccaatatattctcctattctatggctcaactcttcactttattgattgtttcctttgctgtgcagaagctttctatcttgatgcgatcccatttgttcattttttggtttggttgcctgtgcttgtggagtattacttaataaatctttgcccacaccaatgtcctgaagagtttttccaattttttcttgtagagcaattttggaaaatatactaacacatagaaattacagaatatacttttgattgaccaatgagtctgtgaagaaattaagaaagaaactttaaaaaggtcaaatgaaacaaatgataatgggaatacaacataggaaaaccaatgtgataatgtgaaagcagtactaagaggggaatttatagctataactccctgtgtcaaaaaagaagaatagcatcaaatgaattgcccactgatgcaccttaaagaattagaaaaggaagagcaaacaaaatccaaaattagtagaataaaagaaacaataaagattagagcacaaataaatgaatttgaaatgaagaaaacatatgaaagatcagataaatgaaaagttggttttttgaaaagataaaaaaaattggcaaacttttagccaggctagtagctaagaaaaacagagagaagtcccaaataaataaaactagagatgaaaaaggagacattacaagtaatactacagaaattaaaaggatcattaatgaccactctgagcaaatgtatggcaatacactggaaaatctagaggaaatgaataagtccctacatacatacaacttactaagattgaactagaaataaatccaaaacccaaactaacaaataacaaataattagatcaaagacataagaaaaagtatctcaataaagaaaataccttactgctgaattctacaaaacatttaaagaagaaataataccaatactactcgaactattccaaaaaacagaggaggaaggagtaattctaaactcattctatgaggctagtattaccaaaaaccagaaaaaggaaaaaccaaacaaaggtatattataaaaagaaaacaacaggccaacacccttgattaataataatgcaaaaatcctgaacaagatgctaccaaaccgaattcaacaacacattggaaagatcattcattatcactaattgggatttatcctagtgatgcaaggatggttcaaaatatgcaaaccaatcaatgtgatacatcatatcaacagaatacaggacaaaaaccatatgatcatttcaattggtgctgaagaaaacattgaataaaattcaacattctttcatgatgaaagtcctcaaaaaacataataaaagccatatataatagacccacagttagtatcttactgaataggacaagactgaaagtcttttctctaagatcttgaacatgacaatgatgcccactttcaccattgttattcagcgtagtactggaagccttggctagagcaatcagttgagaaagaaaaaaagggaatccaaatgggaaaggaagaagtcaaattatccttgtttgaagatgatatgatattatatttgcaaaaacctaaagattctaccaaaaaaactatcaaaactgataaacatattaggaaagttacaggatacaaaatcaccattcaaaactcagtaacatttctatatgtccacactgaacaatctaaaaaagaaattaaaaatgtagtctcatttacagtagccacaaataaatacctatgagttaacttaagcaaagaagtgaaagatctctataatgaagcacataaaacaccgatgaaataaattgaagattcataaaattggaaagataccccacgttcatggattagaaggattaacattgttaaaatgtccatgctacccaaagcaatctacagattcaatgcaatccttatcaaattccaatgactttcttcacagaaatagaaaaaacaaaaccctaaaatttatctggaaccacaaaagatacagaagagccaaagctctcctaaaccaaaataataaatctggaggaatcactttacctgacttcaaattatactacaaagctatagtaaccaaagcaccatggtactggcataaaagacagacatataagccaatggaacagaatccagaatccagaaactaattcatacatctatgatgaactctttttcaagaagatgacaagaacagacattggggaatcgacagtcttttcaataaacggtgctgggaaaactgtatgtccatatacagaagaatgaaactagacccctacctctctccatatacaaaattcaaatccatatggattaaagacttaaatctaagatctcaaactatgaaactactactagagtttgtgttttcatgtactctctctaaaatatcagggcatctccatactgagaaacggccacatagtactagcagtattacagtaataaacacaaatatcctctaaaaggtcatctctctaacttataactcaaataggtttcccatagaaaccatgtggctcccatctccaaagataagttcataatcaaacatttaaaaaaagacataaatccttataagtgtcctcggaaacaaacaaaaaaagagatccagaaccataaaaaataattttgcaatgattaaaaacataaaaggtaattcaaaaacataattgtaaaatgagaatagtcaggttttagaaaggaagtagatataaataaaaattcttaccatgaaggagatattcactggaattaagaaattgtgcccattattcaaaagcagattagatacagtgaaaagagaattattgaactgaaagatgaatgtgaagaaattatcaagaatgctgcacccagggaagaagacatagaaaatgtaaaagaaatgctaaaagatataaaggacaaattataagtctattcagaattcagaagaaaatgtagagggagtatttaaagagataattgataagaattttccataattaactaatggcatgattcttctgattgaagatatacagtaaacttaaccagaataaataaaaccacatataggcatattagagctaagcttaatgacataggcaaaattatcctaccatccattagagaaaacagactatctgaaaaagaagataatttgactgttgggtaatttttctggaagccagaagacgttgcgatactatcttcaagatactaagagaaaataactgttacgccacaattatgtaagtagctactccatcatactgtaagatgttgagataaagacttttcctggctaaaataaagtgaaaattttactaccaacagatgttcataaacaaatttttaagaaggttctctgaggaaacaaacaagaaaccagaggggagctgagatgcaattagtaaaaagaggcaaaggcattgataaatatataagtgcatccaagcatacactaataatataaatataatattgtgaattttgttaataggagaaaaaccaaggcaggatgggaacattagacagcaataatgtaatccagaaagtgaagaatcaggcatacagtattttaagttctttcaattgtgtcaggaaaaataatacatagacttttaattatgtttatcaaatttttaagaattacactaaagagaaataatgtatatattcttgatatcattaggtgggaaacatgaaattttacaaaagtgacttcttaaagagataaaaaataaaaaataatagaaaaattagggttagtgcagcacaagatacaaatgataaaaaacaatttaaatgtattagttactgataaatataaataaactaagctccctggctaaaagccagcactgatcatattaataaaaagcatactcaatgccatgcagctcataaaaatattctaaagcatatagacataaaaatttggagaaaaaaagaaaaagaaaactgttctcaaaaaagcgtgagcaggctttaatgattcaagagtaccttttagtatttaagtcctagcaacacagacaaaggtcaaggtaaacttaattaggtctccactgtggcttgtatttgtagcctcaaatttaacagtgtatattttattcttgtgtttattttatataaaatgttgtattttctacattgatttttttttgctgagatattatttgttttatttatacgttcactatctgtcttactccaatagggtggaagctctaagtgttcaaatgcttttgtctgttaattaactgttatatctctggtgcccagaataatgcctgacagaaattaagtattcaacaaatttggattcatatagttgttggtaaatctgaaaacttggttgccagtaataaatcatttctaagtgattaaatgtttactatgcaaacttacttatacccaatgtttgcaacaggagtaatttttgaataaggaactacttctgttatggcatttaaataaatgttgataaaagaatgatggaagaaagccagtgcaatctacttttagtttgcatattcccctgttattctgtgttaattatttgtacaaatacagttttaaactcctacctaataggacattttctgatgagaaagaacatctattacaaaagagaggagagcagttgaatcagaaatacgtgatataaatgccaaagctgttgtgattttaatttgtcttgatttttagcaagtgttacattgcaagtgtgttgcaattggctgacatttttcagacatttaaaaattccggaatatctaagatattttaggcagttctaataaaaatgaaaacccgacaataagcataactgataaaacctcttcacaattttggccctgctttacaatttaatgcactgacttgttctcagtcctgcagtgcttagtatctcctgtataccctttgtatgttcaattgcagtgctagaatatattatgaagactaaagcccaaatgtaatctatattaggaactattcataaccaagagtccatatctgcataaattaaacttgagaacaatgccatacatattttatacataagctgtcttttctcaacaaaagtaaactcgttaactcaaaaaataattttgcttttgtcattttgacctgcaggtgaacacatatatgtataactaagtcataatttagttattcatttttacccattttcttgtttattatctttttctcttattggcaaaatccagattataaaatgtgttcaatggctttttggccaactatctcatttgcacacagtgactagagaatatttaaaactataacagcgtgaagtttacatctgctgtttgggcctaattaggttccatactcttttactttaagaaatagccacttgattttctggtgttgatccacctactcctacttgccgttttcacagtttgggaagggagaatgccaccctcacgccattggggttgacacatgacctaggccggagcagttagagaaataacatccctcgtctactgtggttgactcaaaagtcagcacttaatccaagctaagccaatgaagccattcttcaacttttgctagaaatattgggaaggaaacattttgtttctactaaattacttatcaaataggacatacgactgttggtgatggcaatctctgtagaaatctacctgaaaatgaaggcaacaggaaagcaggagcaaaagatggagaaatactggtatctgtggctttcctctctgcctcttctccagctacactgccctcatttcaattcccctcacatgcaaaacacacttcctcctcaaggcctctgcacttgccactattgtccctaggatgctgttccactagatatgcacataggtattctctcatttcagccaggtctttattaaaatacaaagttctcagtaaagccaactggctgttcaagctatcacacagatgcccttccccagtttgcctatttttttttcttcgtagcaattattttatataataaaccatttaaattcttttttttttaatttttagggacagggtctcatgttgttgcccaggctggagtgcagctcactacagcctcaaattcctgagttcaggtgatcctcctgcctcagcctcccaagtagctgggagtacaggcctgtgccatcaatctaagctaattaaaaaaaaattgcagagacatggtcttttatgtgttccaggctgatctcaaatctatttatgttttgtttcacctagtagaatgaaagctacttgaaggagattttggtctctttaattgacttctctattctagctctagaatagtagtcaacacttaatactcatgtctgttgaatgaatgaatgtcataatgtgggcatctatatccaattgtgcctgaagcttgtggacctttcacttatctgagaaaaacaatttatcttgtattctttagtcgggagttctacatcagctttaatttaaaaagtgtacataataaacaattttatatttatatttgtataaattgaagaatggcactttattcctttgattgaaatcaataagttgcccatgatatggtaagactcctgaatttctgactccctaaaagatatctgccgttaataaaaaatttaagttatgctttaaaacaataaaaattacacaatttgcaaacaaataagtgggttatgtcttattcatatggattttgtaaactatactcacaggtaacaaaaatccagcatagaatgtggaagacaagacatgctaaagaaagaggtgtacgattaaaagtaaacatgaatacagttgtctcttgtatccttgggggatttgttccaggacccccgtggatagcaaaatccatggatattcaagtcccttatataaaatgcgtagtatttgcatataagctatgtacattctcccacacactttaaatcatccttagattacttataatacctactacaatgcaaatgctaagtgaatagctgttgtactgtattgtttttgtttgagttatttttattatgttatttgaattagtgtttttatttatttttaaaattttccattcacattaatggttgactgagtccatggatgtggagcccacagatatagagccaactcaatagtgcacttcacttagaagaagcttctatatcacttgctgtagagggtttagtgtgtaaggatggtgcaagaattggtgtgacttacattgttaatatatgcacacacatacacaaacatggaagaaattatgaaccatttgaaagactacataagtgtatcattcttgggtcatttattaggatgaggaatgagattttttaatattaccactataaagtgatctatttactaagctcttcactgtaatatcatgatttaaattcaccttatgttagtgatatctagaacctcaattactggtggagcttttgcaacacaattttgatttcagtctcaaagaaattgcattaggagctgttaaacagtaggggttaatttaattccaaatgatgatgtttaacaattttaaaatgagtcaataaatgataaaacaatacatgagtacataaatttgtgtattctcatgatttcattgtacatttatgaaaaaatagtaaaatctatttaaaaagccaacacatggaatttctgggaagaaattttgatgttttgatatatgtttcagagatgcctaacttattttctggtcatctctaaactcattttattaaaatagaagtcttcacgttctaacaaaatattttttctaaataaatcttaatacttttattataatagaccaggaacaaagataacatgtctttctataccaaagtattgaatactttgaaaaataaattactataattttagctagcctccattatatggcatgcaatgtataaaaggcatgtttttattctgttagaatagtttatcttgattttaaaaatagaaaaagtagcactttttgacttccaaatccacttggattttctaataaaaactaaaatctaggtagctgaatgcttctttttaggagtaaatattttcagaacaagaataaagaacacgagtctgtaatgcaaaggaaatgaattggcaatcattcagagttttccttattttcattgttttcttttgtttataatgacttatatactgaatgttatcccaatagaatatttcaacagtattcctaatctgtagattcctaatgaatttgtttacctatgaaaataaattctgaatcagttaatgaaacatgaaataaacacgtatctgtacatagacacacacacacacagtatgccctagtgctgggcttctaaaactcgatgtgcacatgaaacacctggagatcacattaaatgcagattccggtccaataggtctggatcttgcatccttaacaatgtcgcaagtgatagccatactctgctccttgaagtaaactttgaacatcaggggttacttggctgactacaagcctgaatatgttttcaccacaaaggtttttatgtgatttcttcattggcctcttctttttaatattatagaaaaaaaagctttaatattatagaaaaaaagacatcatgtttcctaatctttttatgtttctccatggctaacattttttatatgaaggtaatattaagttcctttgtcttggaacgaaattttattctagttatgtccagatataatttcaaatatattttgtttattggtcaatgagaattttgtctatagaatcaatgttttctaatttttttccttaatagcttttgaatatttatttctattatttttccatgttttctaattttgttatatctccaggtgctgttttccatatggtttgccattttttaaaaaaggtattataattctttttttcccctgagtttaggagaattgcagaaatgtggctttttattgactccttcaccattctgaatttagtaatttgtattttcttcttgttctcttattttcttctttgcaattatcttagtaatggatttagtgttggtttatagtcaaaagatttttatttttttcatgagtgtaagattaaaccaagaaaggaaacacattttatacatagccattcacttcacttattgactttataaactaattaatttatttatgcaatcattcattgaacaacttctactcttcaacaacttagagtataactgattttacagacagaataatccctgtaattctgggtctcttagcaagataaacctcatttacttatcttctgcttatcaaagttaccaccccacagtcttttgtttgtagcagttgttgacctttgaaagagatatatttttcatcttctaattattgcagacttcacgcaggggagaacaaaactgatgggttcatctgaagggcagttcagcagctggatcagtctcattcatattaagatcttaataccacaaagaacactacgttgaatagctagggggagcgagtgagcttctagagaaacctgttccctgttatttttatccagttgggatttgaggaattccacctaatactgccttattgctatcatacctcataaacatttctcaatgtacttacaagtagacaacaatgtaggttggtttccctttggaccaacaataaatttcccccatttttatgttttattgatcataattatgagaagctcagagcagagctggaaagtctgggtacattttgccatcttagtatgaagttttgtactattccttagaagactgtactagagtgtcgtatatcccatgaggacttactgaattgtgaaactcatgagttttgtgaaacaaaacctaggaaccatacaaagtacttctaatgcctcagggattgcaaaagtaataaatagtaattaataaaacaacaaaaaagtaatttgattgctagaatatcatttatttgactttatgaccaagcatgtgtcttatgatgaaataatttgtgagcaatacatcaatttctaaatcatgaagataagcagaaaggataactgaaacatgtaagtagaatatataaatatatataaacaaaatttttaaattgtgagttttttgcagattaaaagattatcattttcctttttataattttaacctttattttagttttgaagatacacgtgcatgttggttacctaagtatttgtatgatactaagatttggggtacaattcatcctgtcacccaggaactgagaatagcatccaaaattagttttgggtgccattattattagttttattatcattatattattattcattataaataataattattattatattatcagtttttcaacttttgttttcctccccgtctcccctctttagtagtccccagtgtctatcatttttatatccctgagtaaccaatctttatctcacagttataagtgagaaaatatgttatttttctgttcttgcatcaatttgcttaaaataatgtcttccagctacatcaatattgctgcaaaggaaatgattttgttctttttgaaagctctttagtattccatggtgtatatgtactacattttctttatccaatgcaccactgatggtcacctagattgattccacatctttgctcttagaaacattgctgtgataaacatatgagtgaatgtgacttttcggtagaaaaatttattttcttttggatacccagtaatgggattactgggttaagtagtagttctatattaagttattttaaaaatctcctaaccgcctttgatagtggctaaactaatttacattcccatcaacagtgtacaagcattctcttttctctgctgccatgccagaatctgtgtttcctaaataataataataataatagccattgtaacagctgtgagatggtatctcattatgggtttgatttgtagttatctgatgatcagtggtgtggagtactttttcatatgattattggtcacttgtatgtcttcttttgagaagtgtctgttcatgtattttgcccatttttaacgagatttgatttttgcttgtccaattgtttaaacttcttataaatactggatattaaacctttattgaatgcatagtttgttaatatttttcccaatctgtaggttttctgttaactctgttgatagtttcttttgatgtgcagaagctctttagtttaattaggtctcacttgtcaatttttgcttttgttacaattgcctttgaagacttagccataaattatttccaaaggccaatgtctggaatagtatttcctaagtttgttttccagaatttgtgtagtttgaggtctcacatttaaatattcagatgatgagactgacatgctgactactgctccaatgaggcagatacatttaaatctttaatccatcttgagttaatttctgtatatggtgaaaggtagggggtccggggtttttttgttttttgtttttttgagatggagttttgctctgtcacccaggctggagtgcagtggctcgatctcggctcactgcaagctccgcctcccgggttcacgccattctcctgtcttagcctctgagtagctgggactacaggcgcccgccaccccgcccagctaattttttgtatttttagtagagacggggtttcaccgtgttagtcaggatggtctcaatcttctgacctcatgatccacctgcctcggcctcccaaagtgctgggattacaggcgtgagccaccgagccaggccagggagtcctgtcttatgcgtctgcatatgactggccagctatgccaccaccatttattaaatagggagtcttttcctcatttcttattttttgccgactttgttgaagatcagatgggtgtagtagatgtgtaactttgtttctgggttctccattctgttccatttttctgtatgtctgtttttgtacccgcctagtgctgttttggttactgtagttgtatagcatagtttgaagttgagtaatatgatgcctctggttttgttctttttccttaggattacttaaaaaccttttttttttaaatacaaaggtagtaatagctaattgagtatgttaaataacataaagtgattgcctattactttaagtggctttaaatatataggcatacctcggagatatagggaattcagttccagaccaccacaataaagggaatatagtaataaagcatgccacacatttttttggtttctcaatgcatataaactttatgtttacaatataccatagtgtattgtgttcaaaggtattatatctcaaaaacagtatgtaccttaatttaaaaatacttttttttttgctgaaaaaatgctaacaatcataagaggcttcaggaaatttcaatcttctggctggtaaagggtcttgacttgatgttgatggctgctgactaagtagggtggtggttgctaaagattagggcagctataacaatttctgaatataagacaaaaatgaagtttgccacattgattgactcttcctttcatgaaacatttctctgtagaattctatgctgtttaatagcattttctccacagtagatttttttcccaaaattggacaccatcttctctcaaatcctggtactgctttacaattaagttcatgtaatattcaaaatcacttgctgtcatttcaacaatgttgcttctacacagcatcttcaccaagagctgattccatctcaagaacccactttctttgctcacccataagaagcagctcttcatccattgaagttttatcacaaaattgcaataattcagtcatatcttcaggctccacttctataattatcttgttatttccaccacatctgcagttacatcctccactgaaatcttgaacctctcaaagtcatcaatgagggttggaatcaactccttccaaactcttgttaatgttgccattttgaccttctccagtgaatcacaaatgtccttaagggcatctggaatggtgaatcctttccagaggttttcaatttactttgtcccgatccatccgaggaattactatctacggcagctataggttttcagatatattgcttaaataagaaaactggagtcaaaattgctctttgatacaaggactacagaatgggtgtttgttagcagggcatgaaaacaacattcatctctttgcacatcttcattagagcttttgcgtaatgagatgcattgtcaatgagcagtaatatttttaaaagaatctttttttctatgcagtaaatctcaacagtgggcttaacatgttcagtaaaccatgatgtaaacggatatactgtcacccaagtgtggttgttccatttacagagcacagacagactaggtttagcatcatttttaagagccccagggtttttcaaatagtaaatgagcattggcttcaacttaaaatcaccggctggattaaccccaaacaaagaagttagcttatcttttgaagtttcaaagccagacattcacttctgtctagctatgaaaatcttagatggcatcttcttccaatgtaaggctatttcgtctaaactggaaatttggtttagtgtagccccactgataaatgatcttagctagaccttccgaataacttgttgaagtttctacataagcacttgctgtttcaccttgcaattttatattctagaaataacttttttccttaaatctcatgaacaaacctctgctaccttcatactttacttatgcagcttcctcacctctcaggttttacagaattgaagagagttagggcattggtctggctaggctttagcttaagggaatgttgtgtctgctttgattttctatctatattactcaaactcttcatatcagcaataagcctctgtgtgtgtgtgtgtgtgtgtgtgtgtgtgtgtgtgtgtgtgtgtatgttttaccttcttatcatttgtgtgttccctgcaacagcaattttaatctccttcaaggactcttcctttgcattcacaaaatggctgttcgatgcaagaaatctagctttcagtctgtcttggccttcagcctatcttggctttaggcatgcttacctcattaaacgtaatcatttctagcttttgattaaaagtgagagatatgtgactcttcttttacttgaacacccaaagaccattgtagggttatcaattgttctaattttaatgttgttgtgtctcagaaaatacggaagtccaaggagaaggaaagatattgaggaatggccagttgatggaacggagagaagaccacacagtatctatcaaataagggcgtaatttgtggcatctcaaaacaattacaatagtaacatcaaaaataactagtcagagatcaccataacagttataataataatgaaaagatttgaaatattgtaagcattatcaaaatgtaacaaagacacagagtgagtatatgctattagagaaatggcactaataggcttggtcaatgcttggttgtcacagactttcaatttgttaaaaatgcagtactgtgaagcacagtaaagcaaagtacaataaagtgaagtatgcctgtactcataataaaaacaaaaaactgcaaataagaataaaaacttctaaagaacataataatatttttcttcgatagcaggaatataaaatcctaaatatttgttcatttttttgaaatgatatatgggatacaaattagttggttttctttctgaattcttatatttgacccaagaaatataagtatctgttatagataggtgttcagacgttttgataagtttgtgttctcatacattttatatggttaaaatactattgatgtttaaagaaaagatgagctatattcctaggtttaaattctgtcatctccaaatttctgctcttttttactttgcgtaaagggataagaaaaaacctataataaatattcaaattttattttgtttaattcttctcctcaaaaaccattatatctaaatgaattattatagtttttttctgatgtaactcctgattctaaaaagaaataaaaaaaagaggattattatttattgggctcctgggaagcctgcattctcttgaattcaatatatgcttcttagaaaacagaagacagtgcaggctgtaagtattcatagaagttttgaccacatataatcaaaagttataaaaaattattacgaaaagaggtcatatatttcatagaaaattaaataattattcttagagcccactacaatattagcatattatgtgttccctcacagaaggaaaaatctctacaaatacaacacattaattcaactgtagcacctctaataccttaagtatcaaaaataaaatgggagtataaggccatagccatcatttcattaaactatacagaacctttatctttcagaatgtatacttattattgatcattaaaagttaactccaaatattgctagaatatagctaaaacacattttaaaatacaatatagttctgaaatattctggttcagagaaaaaaatgtgtatatatatgtgtatacatacatatatacagacacttttttatatgtgtatttgtgtatatatgtatgtatgtgtgtatacaacacacatatacacacacacagacatacgtaatgctggaatcatcaaagtatgtctcagagtcaaatctagctcactgtcaatatttttgttgtttgtttgttgaagagcaagtcatgtaacatcagattaaccatttgaaaggacgcaatttagtggcaatgaatacattcacaatgtggtgcaaaccaccacctctatcaagtgtaatgcattttcataatccccccaaagatactttgcacttactaagcagtcagtctccattcacccttcctgcagatgctggcaaccgccaatgtgcttctggttatatggatttacctattctggatattccacataaatccaattatatagtatgtgaattttctgcccggcttctttcacttagcacgtttttgagattcatccatgttataacagatatcagtacttcatttctttttatttgtgaaagacatttcattatatgtatatactacaatttgtgtatttattaatctataatgaacattttgactgtgtagtaatttcagtcttttctcctttatgagtcaagctagttaaaactttatcaattttgtggatattttttgaaatccaacttttggatttgttcattttgtctgttgtttttctgttttctctttttagaatatctattgtaatctttgtgatatccttccttctactagcattagatttagtttactcttatttttctagttccttgaggtataaaatcaggttattgatctgagatttttttatttgttattacgcacatttactgctatacatttccctctaagcttaatttttattaaatcccatacgttttagcattctgtgctttcattttcatttatctttaagtacttttaaatttctcttgtggtttcttattttactcattggttaagggtgtgttgtttaatttccacatgtttgtgaattttccagttttccttctgttattaatttctagttccattctattgtgcttgtggaataaactttgaaatatcataatatttcaacatttattgaaacatattttttactttatgtatgggctattctcaagaatgttccatgtacaactgagaaaaatgtgtattctggtgttgttgggtggagcattctgtttatgtctgtttaagtattgagtgttggttaagttgttgtatccattattgaatatattgtttctgatcaaatactgtttctgtttttgttctttctctccactttgtgagacgtcttttatgtttatattggtatgttttatggtgtcacacaggtattttagctctgttatttttcttccttgtttcatttttctgttgcttacactgggtaattgtgattgacctatcttcaaatttgttgattttatttcttctgtctcttcaaatctactattaaaactctctagtaaatttttattttcgttattgtgtttgttttggctccagagttatgtttggttctttttaaataatatatatttctttattgatattttctatttgtttatatggtgtcctattggttttctttctctatttgtacatggtatattttagctctttgagcatatttaatatcattgattttaaatctttgtttagtaatgtaacatctttgtttccttgggatagtttttgttcatgtctcttgagaatggactatactttccgatatcttttcattctattttttgttgcaaattggacatattaagtattatgatgaaataattctgaaatctgattcttctccttccttgggtttttttttttaatttgctttttgtgggttgagatagtttcggtagtgactttttaaaagtattttcagaaagtctatattcttttttacgtatggtctctgaattctctgtaggtttagcttgtggtctaccagtgttttaacagagattttcttaaacaactgaagccacaaaaaattaaaagaaaaaaataaaatgaaaaaatattattttcctattctgacaagattggctctatgttgatgcatcattttaatgcttaatcaggccgtttacaactctgtctaagccttcacttcctgctgccctgaaaccagggatcagcgcaaggtgaaagctttgggccttctgtcttgtctgaggatgagtcctactctgttttcatgtgttcctttgtgtgttctctggtatatgcaggcacttttcaattccctaattcccaaagaaactctctccagcttttcctcccaggcttcagcttttctgttgtttcccttgactgtaatgttttgctgcagttggcaatgggttgttcaattgctttataatgttttgaagaaatatcctctgcatagttgtggtctgcactgagagaattctgagttctgtgaaacaaaagcaagtacctcgggccattccttcaggtaaccctcagacaggtcaaaacagacaaacacaaattatctgagaataatgtctgctttactcctttcataacctagggccagtgttctatactaggaatgtgggctactgtcttcaagactgccagcgaagtaggtgaggcaagggaaagtaaaaacatcacaaagatttcttgtcatttttaagttgtcttttccttgattcagcatttagtttgttggtacagtctttgaatatttttcagacattggggaaaattgattctgacagttttgcttaatttttcgatgtttcagttgagggacaggcccttgaaactacctactctgtcatttttgctgacatcatgccttactgtatatttttggagatagatttttattggaacgcagccacttttttcttttacttacaatctatagcatctcttgagctacattgacagaattgaatagttgtaacagactgcctaaactgaaaaccctaaaatatttactacctggtcatttttagaaaatgttttctgaccccagctgtaggataggaaagtttagaagtatgtaacttccatctcaatggtgaaaattatctacagtaaaaggatacaaagttttaggactgataataaaaataatcagctagataaacactgacttttttttctattgtacaatatatttccacatgaccaaagggattacaatggattgatttagtttggtgatttcatattacacactgtggagccctaagattctgcagacttgccttaggttgacagcagggcaaagctctggaaacactggtgtatttcaaccaaaacatctccacttttgtttcacgtatctgaatgtgtataaaatttcatttgtaaaaagcgttcttttgattttgtgaaagattaaaaatcacttctttagctgattgattttcatcattaattccatgaaatttaaatctaattacagaattgcaagaactaaatttataattgccatatctttgttttactttattacttttctgagacctcacaaatcattttcaaagtagatatcaatccctatgttgtcactctgtagaatagagtgcttgataaaagatttaaattggtgcttttttgtacaatgatttgtgagtcttcatacagtgaataaagtagaggctttcatcagtaattttaaattcagttattgtaattctataataagatacgtgacaaacctcatatgttattccaaaaataattcttcagtttacgcatggaaagagcaagggaggaaaaacagagagagaaattgagagacagaaaaagaggcagagagagagagagggattcttcaatggaagaaactaattcctttaaggcgagaaatttgctagggtagtaaaagaagttagtttaggagaaaaaatggtgaattttcatttgtatagtcttgttatttctgcctttgtgcttttaataacttgagcctttctttctttctttcacaaatattacaaaaaatgtagacaagttattatatttgagaaataaatgcacacacatatatatgggtgttctctaaagaattatgagtatcaaccaaataattatggttttaatcattttgaattatccactgtcacaatcactataagctcttatatttcttttaacaacgctttttaaaattaattttattttgtatatttaaggtatacaacatgatgttatgggacacataaataacaatacaattactatagtaaagcaaattagcatatattttaaatagtatcaattttgatacacttgtgatttttatagactttggtatttaataagtgttaaaaataaaagttcttaatgtgtcaaatgactactttgtgaactcattgttacactgatgtttaggaaattaagtcctgacagttttctcaaattgtagccacactgtttctttatcctttgatggtaatttgctatgttctgaatataaaatgtacataagctagaaatataaaaatttaattttttaaagcatgttgataaacccaaacagagcagtggagttgtgaggtgagatcatgtaattgccatttagaagtactatatggtccccagttattttgtctttgacaagagaacaaacttacatctctctcacttcttttttccctatcttcactgcacttgtttctgccttgtaatttccatgtcttagactgtccaagacctttccaaggtcctgaattcatgacctgtaaaagattctaaccttctatagagtctcatttcctacagtactcatctcccctacatattattatatattaactgagggatcaataaatttctttaaatattcaatgattatgtaccaaagacattaaatactttatactttatagggcatatgatatctgctgccactactcaaatctgctatagtagctcaaaattagccacaggcaatatgcagacaaatgactatggctgtgttgcaataaaactgtatacatggataatgaaatttgaatttcatatagctttcaaatgtcacataatatttttctttgaaatgtttctttctttttttcataaaagggaattttttatttccgtaaacatttagaaactgacacaactcagggttataaaattgttattttaggaaacaaaagtgatttaactcacaaagacaaggcaatgaaaaaaacattcgttttagttgcttgtaaatgtggaaataaattgagagaaattttggcataaatgatcaaatcccttggtaaccagattatttaagtcactgctattagaattaatgacactgttctcaggaaaaagaatctctggcctttacaactctttacttagaagatagtatttcagtaaaattaataaacaataacttacttgggaaatgtatttggattagaattaaaaacattgattacaacatttcacataagaaaatgaaaaaaactagtttgaacaaatacattgttcatattataaattaaacagcataatatgttgctaatacttttaagttcctgtgattttaaaaatgagaatattttcaaaatctatgtgttatacagttgctaaaactctactgataatgagagccatttgaagatgaatttcatggaaataaatttgttctagaataaaataaaaatgggaactattaatccagaaatcattcataaatcaattcctgaagattttgaaaattatattttttaaataaaatcattcttattttgcaattacttgatacattttacattttttttttacttttattttaggtgcaggggtatatgtgaaggtttgttatataagtaaacttgtgtcacggtggtttttatacagcttacttcaccacccaggtattaaacctggtacctaatagttattttttctgctgctctccttcctcccaacactgcactctcaggtagaccccagtgtctgttgttctcttcttttgtggtcatgagttttcatcatctagctgccactgataggttagaacatgcggtatttggttctctgtttccactttggtttgctaagaacaatggcctccagctccattcatgttcccgcaaaggtcataatctccttctttttactggttgcatagtattccatggtacaaatgtaccacattttctttatccaacttgtcattggtaagccctcaggtttactccatgtctttgctattgtgaatagtggttcagtgaacatttgtatccatgtgtctttatgatagaatgatttatattcctctgggtatatactcagtaatgggattgctggatcaaatggtagttccacttttagctctctgaagaattgccatctgctttccacaaaggtttaaccaatttacgctcagaccaacagtgtgtgagtgttcccttttctccacaaccttgccagcatctgttattttttgagattttaataacagacattctgactggtatgagaatgatatctcattgtggttcttgtttgcatttctctactgaccagtgatattgagctttttttcgtatgctttttggccacatgtcttcaagcatttaaaaatgtaaacactatgtttaactcaaaggccattcaaaaacaggtggtagacaggatttggttcaagatccataatttattcaccactgttttattttatcttctatatgtgttaaagttttgtctatcacttaataatgctttccacagggaaaaaaataggcatatctgtacaattactttgttagaaaaagggctgaaagctggtgagctacattcacatactgcacatgtggcccacattaataaattcagcacaattacaaattgattttttgtttttcctttagagctagtgaataataaatcagaagcacaaatattgcaggtacaaaaaagagtagacaactgctaatgttctaccatttgtgaagaatgtcaaatgaaaacattatgttacctctcatttggttacacattgcaataaaataagaatagctagccacatgcagtgactcacacctgtaatcccagcactttgggaggctgaggcaggaggattgcttgaggccaggagtgggagactagcctggagtacattgcaaaatctgtctcttaaaacacacacacacacacacacacacacacacgtgggtgtgtaaatatataaaaaataatagctgttacctggggaaagtgtgctgacatgaagtgaagccaatccattacatcagtttcaaaataggggcgatttgttgatacatataagtacacaaagtccattatctaacacatcttgcattgtttgattaattgatgtagtattttttgagcacttactatgtggcaggcttcctgaaaagagctagaaacaatatttgttcaatgcttacccaaattattttgcttactctttaaggaagaaaaaaatgaaggaaagaaagaaaaagagagagagagaaagaaagaaagaaagaagaaagaaagaaagaaagaaagaaagaaagaaagaaagaaagaaagaaagaagaaagagaaggaaggaaggaaggaaagaaaaagaaagaaagaaagagtgaaaagatgaatggaagaaaagaaggaaggaagaaaagaaggaagaaaggaagaaaagaaggaaggaaggagggaaggatggaaggaaagggggaaggagggagagagggagaaaggaagagagagagggagggaggggagcgaagaagtaaggaaagacaattctttcccccaaaaaagaaaaattacacaaataatctaaagagacaaatgtataaatattgtgaagaaatggagtaatggactgaagaagatgtaacaaaattgaagatcatttagacagtagggttagacagagtctctctgagaaaatgactaccaaggtaaaatttcacacccatttccaattagagattatctttcccattataataataagaattgcagtgccttgcaatgtgatcatctgtgttatccacataggttacactttttttgttgttgttgttgctctcccaccaggaagcttttattttttttaatttaatttaatttaatttaatttaatttaattttatttattatcattatactttaagttttagggtacatgtgcacaatgtgcaagttagttacatatgtatgcatgtgccatgctggtgcgctgcacccactaactcgtcatctagcattaggtatatctcccaatgctatccctcccccctccccccaccccacaacagtccccagagtgtgatgttccccttcctgtgtccatgtgttctcattgttcaattcccacctatgagtgagaatatgcggtgttttgttttttgttcttgcgatagtttactgagaatgatgatttccaatttcatccatgtccctacaaaggacatgaactcatcattttttatggctgcatagtattccatagtgtatatgtgccacattttcttaatccagtctatcattgttggacattcaggttggttccaagtctttgctattgtgaataatgccgcaataaacatacgtgtgcatgtgtctttatagcagcatgatttatagtcctttgggtatatacccagtaatgggatggctgggtcaaatggtatttctagttctagatccctgaggaatcaccacactgacttccacaatggttgaactagtttacagtcccaccaacagtgtaaaagtggtcctatttctccacatcctctccagcacctgttgtttccagactttttaatgattgccattctaactggtgtgagatggtatctcattgtgcttttgatttgcatttctctgatggccagtgatggtgagcattttttcatgtgtcttttggctgcataaatgtcttcttttgagaagtgtctgttcatgtccttcacccactttttgatggggttgtttgttttttttcttgtaaatttgtttgagttcattgtagattctggatattagccctttgtcagatgagtaggttgagaaaattttctcccattctgtaggttgcctgttcactctgatggtagtttcttttgctgtgcagaagctctttagtttaattagatcccatttgtcaattttggcttttattgccattgcttttggtgttttagacatgaagtccttgcccatgcctatgtcctgaatggtaatgcctaggttttcttctagggtttttatggttttaggtctaacgtttaagtctttaatccatcttgaattaatttttgtataaggtgtaaggaagggatccagtttcagctttctacatatggctagccagttttcctagcaccatttattaaatagggaatcctttcaccattgcttgtttttctcaggtttgtcaaagatcagatagttgtagatatgcggtgttatttctgagggctctgttctgttccattgatctatatctctgttttggtatcaggactagattacactttttaattcactcaaagactctatatcagaggaagacattagggcacaaggaggttgaataatttcccaatatcacagaatattagtggtgttcaaatcattatttgaaccttgatgacttgattcaaagtgtgcatccttaagctaactcatcttgccccattttttttaatagaacttggattagtcattgaccattttctagcaatgaactttagatgagctctggaacttcttgttttatgtggatgtcattcctgccacactttattgtaagcagcacattactacaataaatatgttatacatgctattggattgctgcctagtctcacactcaagcaatttatatatttgtgctaccaaccatggtgtgtttatttaaaattttaattttcatgggactatgttatatgccatatttccaaatttcaagagaagttaatatgcaatagtatttttttcaccttttatttaaattttgttacttatgcaaagtagagttctagatctatgttctcatttctttttctgtgcttggcattgtattcattgcacagaggattcttaatatagttgccaatactgcatagtagtcattgttctcaaatttactacagatgaatcttaatgctacctcaaatattatattgctcttattatttgtttgtgtgtttcattgattatccctgcagtggcagaagctgggatgctggttaactctccctaggttactgtttagagttgtagttttatctatttttttactccttggtttaaatacacattgattttaagtgagttcacagcttcttacaattctcctagtttactgtacttgatgcttagtataacaatattgattttctaaccaaacattttaacttcactatgtgaatatattgaacaataggcttgggaacatatgtttctattatttccttcagatagtagggaatggaaaatcggtacaaacactaggtccccacttgtaatttatttatatgatgcccccatactcaattgaagcaagcagcagcaatgtacatcctgcaacatctcaagttagattaaaggctgaacatcaagaaaggaatgtataattttggtgcatgctaggttacaatgcaatccctttccaaggcaaactccatgctttggtatcttgaaagccagaatacatacaatacattagggttagtataacttgctttcttctagggcttttcacaagaggcttgtgagaatttcagcactgaaaacattacaccagaacatgagctggcaggaagaaggtctgcagatttccctccctggaggaaataatgagtggattgaaaatggactatttttgaaacattgttataatttccactatcagttgttgacatcttataaaaaagttatctttgttttaagttacttatacaattgtctgaaaatgtgatgcttttagtattctccttgtctgacagcacaatgtttaaacaattttgtgtaatatgagtttcaatgttttaaatacatattaaagacacatactttactaataacacaagaacgttttcaataatttcaaaaatatttaattgatccctataaaatactcacctatgcaaaatatttgatatttatatagaaagtcattgatttgtgcatatatgcacctccctcccccgtgaaatccatatgttgaagccctaaccccagtactgttaataattcccaattctgcagaatgtacatttattttaggataggtcatttaaagagataattatgttaaaataaggcctttagggtaggctttaattaaaactgactggtgtctgtataagaagaaacgatatacagggaggtaacaggatttgcagggcacagaggaaagaccctttgaggacacagtgagaaagtggccacctgcaaggcaaggagaatcaaacttgtcgacatctccatcttggatttccagcctccaaaactgtgagaaaataaatttatcttgtgtaagccacccagtctgcagtattttgttatggaaaccataacaaaataataaaatagtacccccttatctgcaggggatatattccaagacccttggtgaatccctgaaaccacaggtaaaaccagactctatgtatactttgttttctcctatacatacatacctaccgtaaattctaatttataaattaggcacagtaatagatgagcaataataaccagtaattatatagaacaataacaatctactgtaataaataaaagttatgataatataatctctgtctctcaaaatattgtactgtattcacctgtttttgaacagcagttgacttgggtaaatgaaactgcagattatgggggactactgtatgcatatcatcttcaaaaaccaaatctttaatgaggaatgatgaaggacagcaacactcctttgccagttgttcattcttagaacagttcactgctggggcctttcttccagaatagtaataactcactataaacacctaatttttttaaccagtaaagtaaaactttgttttatttcataccattttctcagtgtctagaatgatacctgacacacagtaagcactcaaaagaactgatcgagttagaagaaatatgaaatttcattgtgaaagaagactgctttcctttgaattaattcaaggacacactagatgagaatggtcattgaccaagataagaaatacatacgaaataaaatagttttgctaaaaatgccgattgtattgcttaaatgagtcaagagagaactttgtactaaaatattcatagtttaagttaattccaatttagaggagactcagtctgctgcaacaatgatagtggcacataatggtcacagaactcatttttaaaatagatccattaccaaaaaagtgtttgttaagcaataaaaaatcgaaaatcaattccttccttttcatttgactttcatcaaaacatttaaaatagtttttttattctgttcttaccaacctatgaacaaaatgaatctcttaacagacaaattttagaaaatgctaaaattaatgtataagccataagctgtcattaaaacacctatatttgtatgatttttgtaagaatgatttatgcaataacttaaagtccaaaggaaaagctaaaaggaatagctaaatagaacacagcatattgaaagttccttctgttttattaaagtctctccctagagctttcagcaaaactttgggtcactgaaaagattctataggtaatgttggaaaaagaaggatatttgtaaagatagagaagagaaatgtatgggtaaactggggaggcaaggattgagagcacctcagttctcaaattgactggttcaatgcaggtaggataaaagacctggcagcccatgtactcattcatttttgcaaaacactatacgtttaaaaataatctagagagttgtttgggaaaatacaattacaaaaactgtctcccacccctccccaaaatgtccaaaaatgtagtcaaaaatgagaacaattttattattgaataaacactgaacatgaatataatgcacatcacaggcaatccgagaggcttcaaaaacagaaataaatttcatccttttatatagtcaaacaaatgcaacccattacatacatactttaaagataaacaatagataatccccaagaaaacttgatagcaccatttgtcacacatggttcagtctagattcacctggtgatacagtttggatatttgtctctttcaaatatcgtgttgaaatgtagcccccagtgttggaggtggggcttggtgggaggtgtctggattactgtggtggatccctcatgaatggcttagcttggggctgtccttgcagtgatgagtgagttatcatgatgagtgagtcctcaccctattagttacagaaaaatctgatggttaaaaagagcctggaacctgcttttctctcccttgctccttctttcaccacatgaaacacaagctgcctttacctttcactatgagtgaaagctccctgcagccctcaccagaaacagatgccagtgccatgcttcttacatagcctgcagtactgtgagccaaataaatctcttttctttatcaattactccagcctcaggtattcctttatagcaatgcaaagcagactaacatacctggtaactgcagtgactggtgttagctaattgatggtattcaatgaaaaaacacacttttatatttttatgaaaaaaggtaattttgtaacttggagcaaggcatccactaaagtgaggctcctaccctcttacaataactgggatataggagtgctgtttctcttgatgtttgcatttcaaggagatggctcccatgcttttgagaaagacttgcctaggtcataaaagcctatctagttttcaaaaggatgtacatacatctcaaagaggggagaaagtacttatgtaattacaagttttctaacgtaaatgctctaagaaaaaggagaagagagaaatctctattttcaacatggagaattgaggagacaaaagtggctccatcttagatgctaatctgccatattgacttctgatcagccccagtcccaggaatgcctcctaatttctactgtatttactgttgttatggtaagactatgtcacccttgatgttactgcacaaattataggctatgatgcatatagcatgctcgcctgttctggaagtttgcctttaattgtcttgctggagcgcatatgccctttccctatggtttagaagccctgggtatggagagtaatggggtggagacttgcttgtcttgttgtcacctaagaccatgcttctgtctgtaaattcccccaacaaaacactttaccaacaaactggatttgtctgctttgatttctcagttacttcagcatttgtgggtcactttgcatatacagttcttccatgaaaccaagaattaagcctcttatttttactttgtatttctattcatacagttattatcattattttgatagtattagtttggtgcaaaaataattgtggttttatcattgcttttaatggcaaaaactgcaattacttttgcaccaacctaatatatagcaatagattaagtaaaatgaaatcataggcaacccaccagtaaggaagtagatttttcagtcgctatacatcctctcttttaaaatagtaggtttatgggtgattcacactctaactgctaaacataaacgtatcatggacatgaatatgctgcccaaaaaaagggttaagaaaaatatccacaacagcttagtttgataatgatgaagaaaaatcaagagtatttaattaattcaagaatagtacaaactcaaaacaactctgatgacccacaggtaacatttcctatagaaaaaatatataaatccaaattatctataggagccttgtaaaattatctggcattcttagaagccaaattttttaatagaatacagaattacaatcttcatgaaaccttaataacaccctgaatttaatttgagtaataaatgatcgtatgtcttaataactcacctaatagcttatttataagtagcttctctcattaaaactaagagtcaagaaattatattaacttaatctatgaggaagttagtgtgtgtgtgtgtgtagttgaggcttacaacaaagtaaggactatgcttcaaaggtattgcatagcatatattcatagaagaccaagctagctgtagatatagataggtagaagtcccaaatgtttggagataacaatctcagggtgctgaaagacattctttattttatttatttatttatttatttatttatttatttatttatttatttattttggagaaagggtcttgctctgtcctccaggctggagagtagtgacgtcaccacgtctacctgcagcctccacctcctgggctcaggtgatccctccacctcagcctctggagtagctgaaaccacaggcatacaccaccatgcctggctaatttttaagattattttgtagagatggagtattgccatgttgcccaggcttgtcttgaactcctgggtcaaagcaatcctccttcctcaactactcccaaagtgctggggttacaggcatgagccactgcacctggccttgatttagaatttaactcacaagtcctaaatcagttcctattattatcatgccgtttatatcttcagtctagtactaaaaattccttttgatatatgaactttacctacactagatattaatagctatcaagccatttttaatcattaattcagaagctcaatgactttatcatattcaaagtaaagttaaatggaaaggtgaagtagctttgtgtcccagtacggcttttacaacttcattaccttaaaatgagttaattgtgtcttctgaatctattttctcacagaaaatttggattatagcccacttcaattttttttcataattaaacaatacatgtgactggttgagaaaacctcagcgttttctattcatcatctttcacgttagaatggggaacggggtgttacagaggaagtgttggtaagagggtagtataatgtatgtagaatggaattctaccaccacgggaataaataacttttataaattaggagtaattatgtgacaattaagtgctttcacagagttaaatcaatacattttcaaataaaggaaagtcgccaaacatggaccggaaagattttgttctatggttaggaataatttttaaagtagattgcatggaagtctctatgaattgttgtattacatgactctatttatatacatatatgttatatataataaatatatataatatatgttgtatatatattatgttatgttaatagttaatttaaatgtcttcaaactatatttttgtatgtatatacatttaagattattatatattaatgttttttaatttttatttatttactttttttatttttattttttgagacagagtctctctctgtcccccaggctggagtgcagtggcgggatctcggctcactgcaaactccgcctcccgggttcatgccattctcctgcctcagcctccagagtagctgagactacagtcgcccgccaccacgcccggctaatttttttgtattttttagtagagacggggtttcaccatgttagccaggacggtctccatctcctgacctcgtgatccaccagtctcggccttccaaagtgctgggattacaggcgtgagccaccgcgcccggctattatatattaatgttatattgatggcattatattaatataggttatatataatatatattttataatataacatacatacattatatattatataatatattataaaacatacatttgtatataaaaactatataaataatgtacatttataatataaataaaataataaaattatataaatataatcatataaatactaaaatacaataaataataatatacatttatatgtatatacacacaaacacaaacacacacacacacacacagagaaagctcagagaatccatgtaaccagcctccagatttgtaaatattttattaccagcatgtaaagatctttcttcaaatcctttccttccctcagatttatatatgtttcaagactttgtgactacgtagtatataagtgagttaggttaagtttgttaattgtgttgctcagatattctacatcttcactgatattttgtctgtattttctgttatggagaaaagtgtcttatttccctttatgctggtcaatttttatgttttccctttctgttaacagttaatttaaatgtcttcaaactatatttttgtatgtatatacatttaagattattatatattaatgttatatggatggcattatattaatattatatagatacattatagagaatccttctttacctctagcactgcttcttcccataaagtctcctttgtctgacatttgttttgttataccatcttcttatcaggtagtgtttgtataaatgttttttctgttctttaacttctgatttttaaggtagatagataacatatattatataaaatatacttatccataatacatattacatacatatatttaaagagtgtccctatgttttactcaattcattttggcagctgtattttatttgaagcagtcagcttatttatatttaacacagttactaccaaattgggtttattaatctcttttggctcatcagttttatgttgcttttctctcctttatttacttctttcaataattttatatttttattattccatacattcctttcattgactggttaaatatatattctcttaccattctcagagattacaacatgcatcctttactttttaaagtctaatataaattttgtctttgccatattcttaatgcagctagaattatagaaattttgaaactccttagcagtttttactatgattgcctttaatttcagttctgtgtataatttaaatgaaactatgcttcataaaatcagtgtttgttcgtatttgacttcctatttgctttttctgatgtttttcactttcccttgcattttcttttggaatcattttcctgctccttaaagaattccctttagattttccattcttgtagatctacttaagaaaatttctcccatttttgtctgaaaatgtcttttcctacatgtggttttgccgaatattatctattagatatagaattctatgttgaagtgtattttcttttgccactttaaagatgggtattatgggctgaattgagtctccttcaaatttatgtgttgaagtcctaatccttagtcacttacaatgtgagtgtatttggagatagggtctttaaagaggtaattattaataaagttaaaccaagtcattaatgtgggaccctaatccagtaggactagtgttcttttaagaaaaggagacagcaagggatgcacccacacagaggaaaggcgatgtgaataccaacaaaaggtggccatttgtaagctaaggagagcaacctcagagaaaacaaacctgctgacacctgcatcgtggagtcctagcctccagaactgtgggcaaatagatttctgttcttgaagccctccagtctgtgctattttgtaatagcaaccttagcaatccaatatacatggcattactttattttcagaatttatttttttcctcttgttctgtagtcattagttttactgttgtctctttgaaagtatgatgtcttttctttcctctggctgcttgtaagactttttttgttacttgtctttagttttcaaaagtttagggctatttgcttatgtgttgttgtctgggagtttgctgagcttcttggattattggattaacctcttttgttaattatctcttcaaatattgtttctattcattcactttcatttctttccttctgcaatcccaactgtatgtttgttagttcgtttgagagtattccatgtctttaattatttgttgtttatttacactatttttaaagttctattttatttataattcacccataacaattatacatatttatggggtacagtgtgatgttttgatacatgcgtacattgtgtaatgatcaagtcagagtaattagtaaaccatcacttcaatatttatcatttatttgacgtgataacattcagaatcctctcttctatctattttgaaatatgtaataaattattgttatctatgattactctaccgtgcaatagaacactagaacttattcctcttatctaactgtaactttttagccattgaccaaactcttcctaaccccacaatttccccctaccccagcttcctgtgatgacttttctactctccacttttatgagtgagttaatttatttttagattccacatataagtgagatcataaaatatttgtctttctgtgtctggcttatgttactgaacctctatactgttttctataatggctactaatttaggtttccaccaataaatagtgtgtaagggttcccttttctccacatccttgccaacacttatctttcactttctttttttttttttgtgaaagagtctcactccatcacccaggctggagtgcagtggtacgatctccgctcactgcaacctctgcctcctgggttcaagcgactctcttgcctcagcctcctgagtagctgggattacaggcatgcaccaccatacccagctaatttttttgtatttttagtagagatggggtttccccatgttggccaggctggtctcgagctcctgacctcaggtgatccacctgcctcgacctcccaaagtcctggaattacaggactttgccctgtaattttacagccaccatgcccagcctcacatttttgataatagtgcttctaacatgtgtgggtgatatcgcattgtgtctttgatttatatttcccttgtgattagtgatgttgaacatttttttctacatctcttgatcatttgtatttactcttttaagacatgtctgttcagcgattttgcccatttttaaattagattatttgtttgctattaagttgctggtattccttataaattctgaatattaacctccaatcagatgcatagtttgaaaatattattttctcttctgtaagttgtcttttcaactgctgatatttttttgctgtgcggaagcttaacttgatgtaatctgtttgtctaatttgtctaatttttcttttgctatctgtgcttttgagatcttatcaaaaaaaattattgcccagattagtgtcatgaagtgtttacactacattttcttctggtagtttcatggtatagggtcttacatttaagtctttaatccacttggagttgagtttgtacatagtgagaggtaagaatctaggtcattcttctgctgtgtatattcaatgtttccagcaccatttaatgaaaatggaatccttatcttaatgtgtgttcttggcccctttattaaaaattagttggctgtagatatgtggatttatttctgggctctctattctgctggactatgtgtctatttttagaaaagaaaccaaaaagagaaacattcccctcccaaatagcgaaagccttgggaccctttccagtaatactctgccatcctataaaaataacgctatgtctggcttacatagtattatcatctgtggatatgtaatgactgttacagataaggtgtcacgtgagggagttgattgaatttagctgcttatggatcaagctagaattccccatgtaggaattcctgccacgagtattggatacaagaccaacaccctcattcttaagctcaccctaatagtagtgccaagataaatattactttatcttgtgaattttaaaactacttgctgtatcctttatagaaggagtccaagacttctcaaagctgttttcctttgggaaaaaaaaagtcagtagaagtaaccttaacatttaaattttgcctgtctttctttaatactaaagaataacaggttattagcatcccaaagtgctgggattacaggcatgagccaccgcacccatcctaaagaaaatattttatgccttgtgcttatgaacttcccagatgacagaaatatttgggaaatttacacctaaatcacactggtacattaataaggttaaggatatccttttagctttcttgattttacagatctaaatatactacaaattgcttttgctatgatcttgggtattctttgaatatgacttattcttgatctcatctcatatgtctgctctcttagcacaatcttaagctcaatattgctcaaattgcataaattacatatcgtgtttacttacaactttgttttcttgctaatattataacaatagcaaaagcaacaataataaaaccatctctgatcctggaatcatcttccaaaaaacaagtttgggtattctgacttcatctctgattccaactttctctatctgcatgtattcaatcataggcctagaaccatccctctatttcctaacagctcctctatcaatctgccaccacgctgttttaatttctcactagctttgatattgaagtattttattagctaccatctggtctttaaaccttagtctcttttcccatttcaaacttataattgtctaataaattatatttccaaagaccaattctggccattagaagatgatttctctctgttggtgttgtccaccttcagtcaaggccaaactgtggtcctcaaattttcttttccaatgtttacctcagtgttcttccctcatcctatgtttcagtcaattgagaatttcagagcttccgctctgcgccccatgcctttccttcacaatatgcatactcatttgctcctgctacttggaaaattatttctactactgccttatgtaccgctccaacatagttgcaggttcttattctaccaagacttcaggattccctttgaattccaacttctttatgcaatatccctggcttactgtcttctgagctgccatatttctaacttagcaaccaacataacatacccatacttttctgagaggacttatacttcccacctgccattcaatctatatcttattttttataatagactttaaatatatattataatgctaaaataacataatcataagaatattaaaaagcctgttttaatgtgtttcgtggatggcaaaaatatagatattacgaaacattcacaaaaaaacatgaagaacaaaatgttgtatacaattccagaacaaagagaaacaatgactcatgcttttcagaaatgtttaatattgacaagtttatatgcaggagattacagaattgaaagataactttttaaaagttcatatgctaggatttccccaagacttctagtacagctattattgaggggaatataaagattcagcagtaacatcagatgagcaggtctcctgttgctttttttgttttagtttgtttctttgtttgaaagagaacttttttgaaggcccttgaaacactttacaaattgaatttcagaaaatatttcatcaatttatttccatgcaagaaatgagaaaccaacattgatttttgtaatttttaattcctcttgagaaatggagaaaaagtgctatattttattagtttgaactcatttactcaatttaaatgctgtattttaaattaatttattcaacaaatgtttacagattgcctactatgtttctatcatggtgcaggaactccagatttaattggagagggggttacaaaacagacatggttcctgctttacagaaatttagattctagatggcaaaaaaaaaattaaacttgggaccaaagtggtttcatactaacaaataataataagtgctgcacagcatatagaacagtgacttaatctaatcagaggctgagtgcaattttccctgaaattttatttattcttgataatgggttatttaaatttattcttttgtgaactagcttttcatttcctttgcctatttttcaattggggtatttgtctttttctaattaaacatattaaagaaaatttaaaggagatataaatccagtgtaatgtcccaaccaaaagtaaagactaaattatttattgtgaattgccttcagttcaaggcaaatatgtgcattgtataagtatttagttaatgtgatgatgcaatttgaaccctattctttatctttagtaataacaatctgtaattacttaatttgtttatttctcggttgtctctatttcctgttttagtaacaagaatataagtagaagaatgcatggctctcatctatcttgttccatatattactaggattttgcacaagttagatattaataaaatatatattggatagtaaaacaaatattttctgtgtatgcaattctgatacttaacatttttgagagtattgtgatataatatggactttttgatggtagtatattaactttttcatttatttggtaatgctttcaaatattacattattaattaatatgttcattaacaccacgatatatatggatttttttccattttcttttgaattatctcccaaatgtaggaaaatggattcaaaggagattgctaaattttgcaagcagtttatcatagaagttaagttcacaacttcaagacagactgctttgtttcacactgactgtatcaaaacatctcatgtacaccataaatatacagaactactatgtaccaacacaaattaaaaataaacaacattttaaaaatcaaagatagattgctttgacttctaggcttcatcacttatgagccacgtagctctgtgccctgtttcctcatctaggaaatgactgacacataaggtcactggaagatttaggtgaattaatctatgttgtgcttaaaacagtaattgatatgcaattagcaatatatgtgttcactctttttgtggtagttgttctgttattatatgaaagtggctttttttttttttttttttttttttgacggagtctcgctctgtggcccaggcgggagtgcagtggcacgatctcggctcaccgcaagctccgcctcccgagttcacgccattctcctgcctcagcctccagagtagctgggactactggcgcccaccaccacgcctggctaattttttgtatttttagtagagacagggtttcatcgtgttagccaggatggtctcgatctgctgacctcgtgatccgcccgcctcggcttcccaaggtacccggattacaggcgtgagccaccacgcccagtgaaaatgacttttaaaataaaaccattgtccctagaaagcacttcagacccccaaaaaagaataatactgtaagaggcttggggctgagtataccatgttaaaataatttagctggatgtaaattaacaaacaaaacaaaaaatccaaatgaaaagcaaatatttaactatataaaagaaatactaaataattgtagccaaatattggggtagtgaagtagaactgtgaaatcggataatattacaaaagtatactggagaaggggcctaagagttgaaccttaagtaaggaactagcactacatgcaacctcaagtagacatatttttaaagacagtcacttcttttataatttctccatgttatttttctgagagcatagctgtacttacacattgataaatgattatgccatgttgcttttcaaaacagtgttctaatttgactgtaagatctaggaattaatctatatctgatgtacttgtaatactccactgcttttcactttggtaatcattaagaacttggctctgttgtcagatatcatgcattagtgtgacttgagtaagacaatccatcccttcaagccttgaaaacaaaatttgatttgaaaaatggcgatggtaaaagtactctctttgttggattgatacgagttcagtgagaaaatctatgcaaaacggttagtaaagtgctggacaaatagaatgccagctattattaggtgagataaaatgtaatgtagatattaaaaagcattggcccactttccactccatcttcattaaggcataaatgacaaatgaaaattgtatacatttaagaagtacaaattgatattttaatataggtgtacattgtgaagtaattgccacaatcatgctaacatattcatcacctcatagttaccattttcttttgtcattagagtacttaagatttacattcttagcaaatttgaagtttgcaatacaatattgttaactatattcacattgttgtacattagatttccagaatatattcatcttgtgtaactgaaactttcaaccgcttgaccaacatctctccatttccgcctccccccagtctctggcaaccactatttcgttctcggtatatatctattcaactattttaagttctacatttaaatgaaatcatgtgggatttgtcaatgttgtgtctgctgacttcacttagcataataaccttcagttttatccatgttgtcccaaatgtctcaaataagtattttcttatttttaacactgattaatattactgtgtatgtgtgtgtacattttctttatccattcacccatcaatggaggtaagactatttctgtttcttggcttttgtgactaatgctgcaatgaatgtgggagtacagatatctctttaacacactggtttcattttcattgaatgtatacctagaaattgtattgcttatagtagttctaattttatttatttatttatttatttattgagacggagtatcactctgtcatcaggctggagtgcagtggtgtgatctagactcactgcaatctctgcctcccgggagttctatttttaatttttgaaaaattttcataccttttttgttaatagctctactaattgatattcacaccaacagtgtacaagggttttattttctccacatgtttatcaacacttgctatctttattttcttttcgataatgctcattatcacaagtataaggtaacacctcatagtggttctaatttgtacttttctgataattagggatgctgagcaccttttctcatacctgttgtccatttgtatgttttgttttgagaaatgtctattcaggtcttttgtccattttttaatcatttttttttctactgagttccttaaatattttgactatatagtttaactttttttacatgtatggtttgcaaatatttcccctaactctgtaaattgccttttcacttcgttgatttttttctttcggaaaaaaaaattggctttagagttaaattgaggttgcttgctgacgtgatatgaagttagacaaagatgtttatgagagactctattactggtcactcatttcacttctttaggaaattggagcagaaagagaggttgactcttcactgagactgggtttggtcagtcaggtttagctaatgaagcttgagttgcatgggccacttcaggggcaaaagcattatttgctcactggtgcttctcagcattctctcattcccttttcttcagttagtggtttctgggcaaactaaaatcgtggaatgaagataatgcaaagcagaggaaaataaactagcatcagagaagtagattttgttgactttgtttgcccaccctgactgattcaaaacttcatctccaaaccttagtttggctcattgatgagaaaagaataataatttgtcctttaaggttcttggtgccaagcaatttactgataatttttgtcttaatatttgatccttgaaacattttcttcacatgacagtcgagaaacttgtccagcaactttcacattctgaacttcaaatgctgggtaattactcctcagaagctacagtggcatgtatgaatcttagatggatttcctgtggggctcaactacaagaaccaaaaaggatgactttaattcccatctctatctgtacctattaataggtgatcctgcttaaataattttaaatataaatatatttctgggcttctattaccttatatgtaaactgaagttaatattactaatcttaaatatttattgcaagttcttaaaactgatgtatgcagaaatatcaagcataatttccagaagatactaatcacctaatgaatagtacttcatttcccattccacaatactgatactttccctttagatacgtacttcaaaacataaacctggagcaccatgagaaaatgttaaacagaggccaggcgtggtggctcacgcctgtaatcccagcactttgggaggccgaggcgggcggatcacgaggtcaggagatcgagaccatcctggctaacatggtgaaaccgtgtctctactaaaaatacaaaaaaattagccgggcgtggtggcgggtgcctgtagtcccgggtactcgggaggctgaggcaggagaatggcgtgaacccgggaggcggagcttgcagtgagccgagatcgtgccactgcactccaggctgggtgacagagtgagacttcgtctcaaaaaaaaaaaaaagaaagaaaatgttaaacagaatgtgtatttctattttttttttttttttgagatggagtctcgctctgtcacccaggctggagtgcagtggtgcagtctcggctcactgcaagctccgcctcccgggttcacgccattctcctgcctcagcctcccgggtagctgggactacaggcacccgccaccacgcccagctaattttttgtatttttagtagagacggagtttcaccatgttagccaggatggtcccgatctcctgacctcgtgatctgcccgcctcacctcccaaagtgctgggattacaggggtgagccacagcgcccagcccagaatgtgtatttcagcaaaaccttaaaattttcaagacccacaagtaaccaggtttttttcatatccaaaacatgcctacactcaactgatctgggagacaatagaagtttatcttagattaaaaataaagccatgactgccagataagattctactactactttattccaacttattatttggtagtttgaacttgtttgtaaattttcacattggttttaatcactagcatttcaagatttactgaggtttatgtgtttttgtgtggaaaaacatcctgctcttttttagactctaatgcttgtttgctacttagctagcataatcatcttttaaaatacacgcattgatgatagattttacattgaaatctagtctaaacaacattttttaaatgtaatgggttttgcaaatttgacaatagggtggaatcatgacaaccgttaaacaccaaactctcaacttctcgcttttgcagtgatcagttctgccactttcttgctttgttacctccagaagatgatgaatgagtaataaaaggcacttgaccatagtaccattttataatcttgtatcataaaagccccagctgaaaacattgtgggctttgtgatcatgatctctgcccagtttagataaactatgtacatggaccaacctacttccagatcatagttatctttgcaaagtgggcttgttcttactgaaaataatgttcttcatagttacccatggcaaacagtgttgtatctccttgttcatatgtaatttgctgaatattaactgatactttacggaagtcaatatgctaagtgctataaatgtttggtacagaaataatttagacctaaactttatcactcctatttgattaggtcaaggaaatctctggagaatgggaaattcttgagctgggtcttatagaaaaagtgaggtattttcaaataaatgaagaaaaatagctttctggagaaagagaaacatgtataaagtcagggagataaaatctgagtatggtgactttggggaactgtgaataaatcagaatgataacagtgtaagttgtatatatgtaaggaaataacaagaacgaaagagatatagcagcaaaaacaaaaattagagactgttttatgtaaaagtataagaaatttagatttcatggtttatacaatatggagctattcaaggctttctaagaaagaaagtaacatgaagttttgtgtttttgttgttgttgttgtttttgagagggagcctagctctgtcgcccaggctggagtgcagtggcatgatcttggctcactgcaagctccgcttcctgggttcacgccattctcctgcctcagcctcctgagtagctgggattacaggtgtccgccaccacactcagctaattttttgtatttttagtagagacagggtttcactgtgttagccaggatggtctcgatctcctgacctcgtgatccgcctgccttggcctcccaaagtgctgggattacaggcatgagccactgcacctggccgaagttttgtgttttaaaaagatgactctttttgcaaaagtgtaatagtatgaaggatatagtgaagggaggaggagaaacagatataaaactagtttcagaagaaagatgatggctggagcatgcttgaattggatatagggaagggggaagtgggacatatatacagagttagtgaggtatagttaaggtttgatataataagaaagattaagactcccaaactgaacaacttgatgagtagaggagatactgactagaataacattgaaggagaagcaacattttcaaggtttgtgttttgttacatttctcttcattttcattcttccttctttctataatagatggtttgcaaagatagacaccaatgtcaccttgcatccttgagcatacataacattatttctataaaaaaatcaagtctattttacccttgacctgagctagcctcaagacttgctttgagctatagaatgggacagaaatgaaaatatgcttatgaggcccagtagcttccacttttgcttttttgaagtcctgagctatcatgtaaaattgttcaactactatgctggaaagggagagtatagtgacaactttaatggtttgggcctatagagaaagagaaagagaaagagaaaaaaaaaaaaaagaaagaaagagagggagggagactgaccagccaggtcctagacattttggtcacaccaaaggaaccaataaacaggtagatgaagtcatcttgcaaaactctaccccagacaaatctctccaatcaacatgacatgtagcatatacaagacattcccactgtgtcttggctatactgcagattcaagaacaaattaaatagtttgctgggtgtggtggctcacacctgtaatcctagcactttgagaggctgacacgggcagatcacttgaggccaggaggtcgggaccagcctggccaacatagtgaaactctgtttctacaaaaaatatgaaaaaaaaaaaattagccgagtgtggtggtgcatgcctgtggtctcagctacttgagaggctgaagcaagagaattgtttgaacttgggaggtggaggttgcagtgagcagagattgagccattgcacttaagactgcgcgacagagcttgaatctgtctcgaaaaaaaaaaaaggataaattgttgtgctttaagctattcacttttgcagtagttttttatatgcagtgattaataactgataatcccttttactctgtcttctctctctatctctctttctgaggcatcattataagtaggaaaacaagaaaaatattgcaataaactcagtcatttagatcatgacttccataggaggtgaatagttgctattcctatcctttgagcaaatttctgtattataaatttcctcctatgatctctaaggcagaccacaaagatactaaaaaacattattcatatataaagttacaagttaggaaaggctctgtaacctagattttcatgagatatgttaagaaatcacaacatctataaatatctttatatattcaaaaagataattattaatctctatccctggggaaaaaaaactataaactacaagaacaatggaaagaattaaggacaaaaaaagactttttcgtcttgtgtgccattttccatagttggacatcttgaattattctttattgcaactgtagatatacaaattataaggttgacattttcctataggttggcaactggtgaatgttctttagtgtgtttaaaatgacataagaatttttttaaacattgaggttagtaattctgctttaaaatcaagaatatttaatgtatttctttggattaacttattatttaaatattttatttataatatcctaccctctttagtaatcaaataattttaacatggaggtccttctctgcaaatgtaaacccaatttataaaatgttaattcatttgctttaaggaaagcacactcaacagaacaaactttttcattatggagggaaaactcaaggggttatcaaagtctacctggggaactttttctaaattactttcacatttattagaggcagaagtagacatttatttgcaaaatatccatagctatgctgcacagcccacaacttttagaagcattgttatatagggagagaaaaaaaaaaggtctcaacttttttctttataaattaattaagttcttttgcttctattagttttcatctaaattaatggcaagcattttagccacctggaactctcctattatctgattaaaaacaaccatttgaaattcaccatctacccaaaatgtttacgtcagttttggttaacactgtttcttataccttgtgttttgtattctattagttccaagtaatgtattctacctcattttcaaggactaaattatatcttatcccttctttttcaatatagtcaccaagacaaatattgatctttcccatctattaatttctaaaactttattcttttctcgcaataaaattatttgcaaaataaaatcattagttcaataaatttctaaatacttgtttagtcttctggtcaatgaaactaggtacattatttctttagagcaggaattcaggcatagctaatattaagagaatgaacagtgaagagtatttgtatgacagatacatgtgttttctgccccttttggtgtgtgaccttgggtagtagcttaaactttcaggcttattatatccccatgagtcgaatcaagactctgatctctaaggcactttcagctctaaggttttaaagctgataatctgagatttcctgccaaagttcatctgtttgctttctattgtccagttttattgatatattgtttcaataagcatttttgaattctgtattatatggcagacataattttttttggtattagagaaagaacatgaatgagacaagaaagcctctattctcagaaagcttaaattctggaggagaggtcagtgggacacacgcagacaataaaataaagaatcataaaaatcaccaaggggttaaagatgatataaagatcaactcttgggtgtctattttagattgagtggcaggaaggtatctcagatataaatggcattttagccaggttctgaaggataaaatgttagccatgcaaagatatagaaagagcattccaggcagtacaaagattccaaggacctgttaaagtaataaaaagaatgctgtggatgctggagcatcatcagggagagagagacagtcctagaaaaagtcaaagtaagccaaagtcagatcacgtagagttttgaaatgatggaaaaggactttgcctttcttttaaatctaatgagaagaggaatgacattactcgatgagttcacttttaataataatcattttaagccaatattttgtccctaaatagtaaaaccagaaattgcttttaggcaaatatttaatacctgggagcattatcctaccacacaagaataatttcagtccagatgtctgacatctgtagtatattattaacatttttttcaggcttcataaattgaaggtggggagtggatacttaattatattctcttacagatttgaatagaaatatgaatggatttaaattttttaatgatagcattttttacttcaaagcaatttgcttgcagctatcttccacatacatacatggtgaaaataatgaatatttagttttttcagataaatcagagttaaatacctttatttagtcctcttagagtggcatttatcctaccttcttctggaaaaaaaaaacaaaaaacacaaacactcctgtatgacattcggatgtaaaagattatatagcatttctttctcaattatttttgaatatatataattacctctgtaataactggaaatatttgtcatttgactttataacagctaaatatcaacttgatattacttattattcctcatgggaaacaaaaattagattcacgcattatatatatttagagtgtgacagaaactgttcttaggaagcctctgacatatttactgagtcttttttttaatctctccactatagaaataggttcttaaaatttggttagaaaattattacaacttaatcttgttgatgaaaaataatggcttaattctctttacattgtctgtatattttttacataagtacattggcataaaaagatctattaataactttagtgtatatgagacaaataatgtataagattatatctgctttatattagataatagaatcattaaattatatcttttccgttttatcctataaaatcaaaattgtttttacaggatgtggaaactttcagaatcagcatgtaatatttattctaggaactatttgagttttataaatcaacaagatgaattgagcacctctttaattaaatatacatattaggtgttgaatgacagtaatgagtaatgaattatttaactgtttaagtcacagccctgccctcaagcaactttgtagtataattggaaagataaggaaaagctaactaaaaccatagtaaacaagcactgaataaaccgggaatcagaaaaaaaaataatttttaatctcagctgtaactttaggaaagccacttaagctttcatagcctttgtttgtacaactgtaaggaaaaaatcaaattaattgctttttaggatgtcttctaactaatattctaagggtttcacaagaatgcttgatacttcaaatgtaccaactagcttcagaagattgatgtatctaaaataaacacaaatcgattccagcaacataactgaattatatattagaaaacccactctctgaccttcaaactctaattataaatgtagacatatgccaatcaaggcaatgcttgttattattattttgaagaagaagaagaaaacaaacaataagacagctcaaaagaaatgggtatcttcatgtgttatatggcaaaatttaatgttcccagctgcaaatacttacatcgcagattatcttacatgaagagataaccatgtaacccatatcacgttgttgagatatacatggaattgatgactggtgtttcaggaaaaaaacttttaaaggtaacaggctcagctgacatatttttttttcacttttagttcttttctcctttgccttgattagaaaactgggtgcttagaagggggaaaaaaacctttgaaaacaaagtctacatacaataaatataaaatatctaggaatactttgaaccaatgaagtgaaagatttctgcaaggagaaatacaaaatactgctaaaaataatcatgcatgacacaaacaaagggaaaaatattccatgctcatggactgaaagaatcagtatcattaaaatggtcatactgccccaagcaatctacagattccgtgctgctttcattagactatcagcaacattcttcaaagaattggaaaaaaatctaggctaaaattcatgtagaatcaaaaacaagctcaaatagtcaaagctatcataagcttaaagaacaaagccggaggcatcacattaaccaatttcaaactatactatcaggctacagttaacagaaacagtatgatactggaacgaaaacaaacatagaccaatggaacagaacagaaaacctatatagaaaaccacacacctacagccatatgatcctcaatgaagctgacaaaaataggcaataggtaaaggattccttattcaataaatggtcatgggataatgggcaagccatgcagaagaataaaattggacccatatctttcaccatatggaaaactaactcaagataaattaaagatttaaatataagacaacaaactataagaatcccagaagaaaaatagaaaacattctggactttggaaagaatttatgactaagacctcaaaagcaattggaacaaacacaaaaattgacaaattggtcctaattaaactaaagaacttctgcacagcaaaagaaactattaacagtgtaaacagataccctacaaaatggaagaaaatgtttgcaaactatgcatctggcaaaggtctgatatccagaatctataagaaacttaaacaattgaacaagcaaaaaacaaatgaccctattaaaaatagtcaaaagacataaacagagactctcaaaagaagacatacaagtgaccaacaaacacattaaaaaaaaatgcttcatttcactaataaccagagaaatgcaaataaagtgcaaatcattggtaatcgacctggatatatgccctagaactctgagttaaagatctgtggttcacacaaaatgaatacattgtagtaaaattatatagaataaaacagtatataaactatatttcagttaattaatttgaaattaattaaagctatacataaaactcaaaactacaatgtaggccaaaaagtaatgttaggaaagtatagcttacatatataagtttcttccaaatttttataaaagaagtatctgtggatatctacctatgtgataacttatgatatatagtctaaatagacctcaagatattggtgatttttagggaagataacaggggtaacttctagaatagcagcatcaacccactgttcatgaaacagccattactggtgcaaattattattttttataaataaaatctctcgggattgtcctaaaaacatacattaaataaagaaacatctattcaagaaaatctaccaaagccctgtaaggagaatgtagattgtgtggcacctaagccatgacctattccctccctactccttctgtaacataatatgatgacagaagctctaattcagggagatatgataaagaaggagggtccaccagacaagggacagggtatctcactggaaagggcaggctgacagcatttcttactgcccctgaaaacttcatgttcagagggtaaattccattaagggtggtagagagattgaggatgccattccttcatccatacctgcttcataggacagaggcttgagcccaggaaaagcaggccaataatattgggatgctgattgcctttccctcactacacttgtagaaaagaagttccatacgggtagagacaaatcaagaaaagcagaaaatagcgtcccatccccaggttcttctcataaagcagaggtgtcacaccaatagaagcaggcggctgtccatgtgccagatccagagattttgatagaaaagaggcagtataaaaacaaaacaaaacaaacaacaacaacaaaacagagatctgaatctctccccaatggacatgccattatttgaaactgactatgggacattaaaaagcccaagagtgttctcaaaaacaatggacattttggtgataagtaactaagtgcaacaacctagaccaaaggccagcagtttgacagaaagaacaaggacttgaattaaaatctacctgtgaaaatgggccccagcttaattggatcagactgtggagcaatttatgtcccagtgcttcatcacacagaaaaaaaaaaaagagaaatcagcaagcaattagtggaccctgaaagctggatgtgacataacaaatgcagacactttataggaatatcagggaaaaagacagccaaagaaagtcctgctaaaaccactgccatcctggcatgactgtgtgcatgcccacagtgcactctctgtgaatcaacatcagatgctttacacggaaaagataatagatttcactaaaatagcccaactatatcactaaacaagaaaaaagaaaactacaagaaaaacaaggcccagggaatggaagaatcagtatccagagttgctatgatagattctcttaagtgactaaatgtaaacaacaacgacaagtacgagaaatgcaaataaatggtgttacacttgggaagggaaatttaaaaacaagcaacagataccatttgtgacacgatccagaaattatgaaacagagacttcaaagcagccattataaatgtatctgaagaactaaaaaaaaaaaaaaaaaaagcatgtttaaagaagtaaaggaaggcataattacaatgtcttagaaagtggaaaattcagtaaaacagttagaaattagaaaagaatgattcaagtagaaatactgcagttaaaaatcaatagcagaaataaaaaattcaccacaggggttcatcatattaagttggtgcaaaagtaattgcagttttgctattccttttgatgcaaaaatcgtgattacttttgcaccaacctaacagatttgaattggcagagaaacaatgacccattaatagagattttttaatctgaagaatacagagaaaatcaaatgaaaaaggatgaccagagcatcaacatacatttaatgggtacatgttccaggagaggaggagagaaaagaaacaacaggaaagaaaaggataaaaataatggatgaaaaactcccaaatgagtgaaaaccactaatgactgaaagttttttaaattatgaaaaaaatcaatctacccatcaaacaagtttaccaaaaccaagtgggataaatgtaaagagattcacactaggtacatcatggttacaatagagaaagcctcaaggagaacattttgaaagcagcaacagaaaaatgactcatcacatacaagggaatttcaataagattaacgtctgtcatctcatcagaaataatgcatgcccagaaggcattaggagcatatagtaaatgctcaaagagaaaaacaaacaaacaaacaaaaacacatacacacacacagctatcaactgactattatatccagaatgctctttttaaaatggagatgaaaaatattagtagattaaaacataaataaataaatactaagacaatgttttgcaaacaggcttgccttacaaaaaacactaaggaatacttcaaactaagagcaagtaacaccagatcataatttaaatccttaaaaaaaacccaataaaacaattaaataattatcaaagagaatataaatgagtatttattctctttacttttcttaactgagttttaaaaactgtataaagtaacatgtatgtaattgtattgctggacctaaaccatacagaaatgtaatatatttctcagtaatagcacagaggtaggtgtcatgaaacttcttttggagtgcagaaatgataccagatggtaatttgaatccaaatgaataaattagtagaaccagtgatgtgttctagatgttttgttccctccaaatgtcattttgaaatctgacctccaaagttataggtgggtctagtgggaaatgctcgggtcataggggttgatccctcatgaatggcttaatgtcctcctcatggtaatgggtgagttcttactcagtttactggagagctggttgtttaaagggtcctggcacctctttgtccctctccctctccctttcaccatgtgacacactgattcccctttttttccactatgactgaaagcttcccaaggactcatcagaagaaaagcagatgctgatgccattcttgtatagcctgtttaaaatgtgaactggccaggtgcagtggctcactcctgtaatgccagcgctttgggaggccgaggtgggcagatcacctgaggtcaggagttcgagaccagcctggccaacatggtgaaatcccatctctactaaaaatacaaaaattagccaggcacagtggtgtgctcctttaaccccagctacccagggggctgaggcaggagaattgctggaactcgagagacagaggctgcagtgagccgagactgcaccactgcactccagcctgagcaacagagcaagactcggtctcaaaaaaaaaaaagtgaaccaaataaacctcttttgcccaagggcggtggctcacacctgtaatcccagcactttggaaggctgagatggcaggatcatttgaggccaggagtttgagaccagccttgtcaacacggcaaaaccctgtctctattaaaattacaaaaattagctgggcatggtggcacatgcctgtaatcccagctactcaggaggctaaggcacaagaatcacttgaactcaggaggcagaggttgcagtgagcagcggtcatgccattgcattctagcctgggcgacagagtgagactttgtctttaaaaaataaataaataaataaataaataatacttttttctttataaattacctagtctcaggtatctcttcatagcaacagaaaatggactaacatgatcagaaagtaagtggtaaattagaaggttaatatagctattagtgatgctatctcccacttttagacactgaataacacaataaactgaatccaaaacaagtagaagtaaagacataagaaaaattttttaaaaatgtatgcttcaaaagacgttagggaagtggcatgacaacccacagaattaaagtcagtatctgcaaatcgtatatcttataaaaaattgtttatagaagtataaataattcttacaacaaatattaaaaaacaacattctaaaatgggaaaatatatgaataaacatttctccaaagaagatatataaatggccaataagcacataaacagagcctcaacaagattagtcatcaaggaaatgctaatcaaaaccacaataagataccatttcacatctgcttggctggctataattttaaaagcagaaaattaccagtttgagtgagaatgtggataactggaaccaacatacactgctgatggaaatgtaaaatggaatatacgctagcttctttacaaaacaatctgacagtaactcaaaggttaaatttagagttgccatttgacccagtaattccactcgcaggtatatagccaaaattgtatacagatattccacagaagcataatttacagtagcaaaaaattgaatgaacttaaatgtttaacaattgatgaatgaattttaaaatgtgatttattaataaaatggaatgttttttaacaatataaaaagaaacgaattactgctgcaagatgggtaagtgttgagggggtcctatatcttttgtccaggctacacttattaacataaatctgtcaccaatccttgtttgtacaaagagaaaacccttaatgagtaccttccatatgccaggcattgtgctaggaagttatgaatgcacttttttttcatctttataactttataaaggagatcatattgtccctttttttaagataagcaagcagaagctaaaaatgaataaataagttacccaaggccataaagctactaaatgccaaggcttggaattaaatttctgtctgtcttatgcaataggcttttcattttatcccatgatatttagtaataaaaataatgcaaacccggccaggcgcagtggctcatacctgtaatcccagcactttgtgaggccgagactggcggatcacgagatcaggagatcgagaccatcctggctaacacggtgaaaccaaaaatagtttattctctactaaaaatgcaaaaaattagccaggcgtggtggcgggcgcctgtagtcccagctacttgggaggctgaggcaggagaatggcgtgaacccgggaggcggagcttgcagtgagccgagatggtgccactgcactccagcctgggtgacagagcaagactccgtctcacataaataaataaataaagcaataataataataattcaaacccacttatcagtagaagaaatagcaaaaataaagtcatatataccttttgagtgtgaagttagtacaactccccagttggttgcttatttacaaatcagacctaccttgtttgggttgagtcaacaaccctggtcagtgagtttatgatgatcacaaattaatgaactccctaatctagactttcttaagaaaggaagtaagataaaagccagggttgctgcagaagctgggaatgttttgaagtgtgaggacacggaaagggaaaggaatagagagttaaaaaatcactggaggatgtgtctctgtgttggtgggggaagggttttttttttgttaacggagaaatttctaagctaccaccatctattaaatattcccgtactaaagagtaactaggaaaaacatttgcatgaaaaaatgttatcaagagaatcaaatgaaagaaattttcatcatggtccaggaaatatatgaaaaacagattttcttaaatgttgtcaagtctgtccctgatactttctatataaactcttactcaaattatgagttacccaataaacagtgcctggtaggcctgcactgaatatttacccttaggtgtaattttaatggtaaggagagatgttttgttgtcgtgatatgtattttatgagtatatagtcaatgttaagtggtcttcgaccgtgcttttggaaacataaattttcatttgtgggctatagtttattcttaagtaaaattaaattttaagtttaaatatattctaaagatttcttccagaatatcagcctactttcatttaacctaatcacaatccacattcactgaaatgaagaaaagcaaaatggcccctcaactcatgaagatggggatgtaaatacagtctagtggaaaatggaagactcagtcaggaggagcagaaattgggattatgtaaggcacttaataatcagaggcatttataattaatttagagattataagtaaagttttttgtacacgtgatctatttcactatattttgtagtagtcattctttattagaatttcccaacagcatcacttagagagcactttgtgtaaattaaagaccatgaccctacctctgaagagtataaattattggtatattttatttccatattatttattcttaaactgaaataaaaattctgacatgcaccattaataacagctgacaaggatacagaggaaagggaactcttatacactgttattgggtataagaataaataataggccgggcgcagtggctcacgcctgtaatcccagcactttgagaggccgaggcgggtggatcatgaggtcgggagatcgagaccatcctggctaacacggtgaaaccccctctctaccaaaaatataaaaaattagccgggcgtggttgtgggtgcctgcagtcccagctactcgggaggctgaggcaggagaatggcgtgaacctgggaggcggagcttgccttgagccgagatcgcgccactgcactccagcctgggcgacagagagagactctgtctcaaaaaaaaaaaaaaaaaaaaagaataaataataaaataataaagccactctgaaaactattatacacttctattgggtatctgcactaaataatagaaccactatgaaaaaaatggagatttctcaaaaattaaaaatagaactaccatataatcttgaaattccagtactatttattcaaagaagaggaaatcagtatatgaaaggtatacatgtacccccatgtttattatggcactagtcaccatagagaaatatggaatcaacttaaatgtccatcaaaagataaatggataaagaaaatgtgatatgcacacacacacacacacacacacacacacacacacacacacacataatagtatactgttaagccattaaaagaaatgaaatcatgtcatttatagcaacatggataaaactggggtcattatgttaagtcacatgagtcaggcaccaaaaaatcaattattgaatgttttcactcacatgtaggagctaaaaatgttggtctaatggatgtagggagtaggatgagagccgccagaggctacaaagtataggggaggtaagagagggggaagaagacagtttggttaataagtacaaacatacagttagatagaaggtgtaagttctaatgttttgcccagagtagggtgactgactatagttagcaacaatgtattgtatatttcaaagtagctagaagagaggacttgaattgtcttcaacacatagaaatgataaatactcaaggtgagggataccccaaatacgcttacttaattattacacattctatgatgtaacaaaatatcacctgtatccaatacatatgtaaaatattataaatcaaatcaaataaaacgtttttccaaaggaattcaggttaaagttggtgctttgcttttgaaatgaatgtcagttacccaaaatggtatttaagatatgtagcctggtttgggggggcagggtggtatttcccattatagagttctttagccttttgtagtgatagagttattctgtatggactactgcaaagagagaaatgttactgttccacgtgatactcattagacagaaatccttttgtttaaccaataattttaactagctcatccaaatattgttttatataaatgacctcttgaattgcaataaggaaataataatattctcagtcatatctgaagtgatattactaaataataattcaaaataaaatataaaagaattaactgtgtcattggcttctacatattccttagatattaaaatattttgtgtagaaactccaagtcatcctctatactgatatttttcctatagcatctcagatttaacaaaacttgtagggaataaaatgaatctgtgtttctaagagttactgtaaaattaaaaaagaaagtcctgatcaaccacttaaatataaaatagttctaaaataacataaaactaataaaccaaacaatttatacatggcatttcaggaattgtggcagaagtaagtttaacagaattgtcatataaaaagtacatacagaatttcatagaataatattgagaactcagtgcttaaataagcaagaaaatagaacagactattcggtgataacatataacaaatattaaaaagatgtctgtggccgggcacagtggctcacacctgttatcccagcactttgggaggccgaggtgggtggatcatgaggtgaggagttcaaaaccagcctggctaacatggtgaaaccccatctctactaaaaatacaaaaattagctgggtgcagtggcaggctcctgtaatcccagctgctcgggagtctgaggcaggagaattgcttaaaccccgggcggcagaggttgcagtgagccaagattgtgccactgcactccaccctggacgacagagtgggactccatctcaaaaagaaaaaaaaaagtccgtgaactagtaaccttgttttaattaaaagtatacatttaaattagatataatttattcttattaaatatgggaaacctaattcttagtactatagagaatacatgaacaggttattgtcatgcagagtttggcaagcaacaataaaaattctgacatttttggaaagtaaattcgctatgcgtttcaaaagccttgaaacagatcatatgattagttagcagctcgttcggattgtgccaaagaaataatcaaggaaatgaaaagttataataaaatatagttatgattattacacaacagcctaaaacatgcatactatgtactgttgagtaaagatattaaaagcaaacaatatgagcactctacctgtgaacatgtcaaaacagttatttatacagataaggtctagaacagaactgatgcaaaaatacaaacaatggtcatgttaagattgtagtgtcatactctgcccctattttccaagttctctttaattttgttatacctttgatgaaattgacatagagaagtgtagaaagtaagtagagggggccgggcatggtggctcatgcctgtaatcccagcacttcagcaggccacaccagggtgattgcttgaggccagaagttcaataccagcttgtgcaacatagtgaaactctgtctctacagaatttttttttttaattagctgggtgtaatggtgccacctgtaattccagctactcaagaagctcagtgggaggattgcttgagttgaggggttcaagactgcagtgagctatgattgtaccattgcacaccagctccggtctggacaacagagcaagaccctgtctcaaaaaaaaaaaaaaaaaggaaggaagaaagtgagtaaaggggctaggtgacatactcactatattcatacactgagatgaaaggcaatggtgaaaggctgtgagaaggacagaataagcacatttcttaaaattttatagagctgtcaaactggtcagaaatcattcggtaaaatgtactgtgagtcttttcttggtttctttattattgtttctatcacctgcagatttggcataacaaaattatgatgattcactgttatgctgcagaaaggtttataatgtatatggaaaaatcttaataatgtttggagcttgagagtctgcaggaaaccatgggaaattgcttttgcaaccacactgaaatgagaacctcatttagagagaccaagggggagggaatactatagataaaagcaagtgaaatacagtatttagaatgacaggtcatcatagaagctaaaaaatgcatttagctcatccaggtgtgctgcatttactcaattttgaaggtctgttagtaagcaaagcacatattatattatgcttcttggtgttttcattagttgtctaacagactaagtataaacattctcttgaaagagaaagtgtgttaaacacttataaaagtaaaccaagttaaatcttatatctgctaggtaaagatcagtatcatatctaacagaagataaagctcagaaagagttatatccttctttgaatggatagcaaaacaaatttccatgctgtcagatcataatgtgttaatgcagaatgaggccccagtgacccacctctgggtgcaggtgtttttagattgaattttaaagtagactcgtctcttttgaacaagtttatacaataataattaaaatgcactaatacaagaggagaaaagatttaattttctataagatactacttcaattgcatgtctcacatatatccggtcttttggtccaaagtgaaaatagatgattttataaactggaagagaatttcataacttgcactcaaaagtaaaattgggcagtcaatgccagaggattttgtctttccaccttttggacgggtcaaaagtgaaagtctttcggaggctaattttacaaatgtacatggaaacacagaggttaactggcttgttcaagttaacatatttaactatgttagaaagattagaactttatagttttttcctcacaattaattatatgttgaaaatatgtatataaattttaagcgagtatagttatttgggacatatagatacactacaaatatctacattttgctttataggttcagagagggcaaggggggattgcctttgaccaataactgactttaagatttaaagagaaaaaaatctttcatttctttagattgacatcagtagaccttaaaactacaaacaaacatatttgctatgttgatacctgagtgcaagaaagagtaaagtcactatacctacagctggctcttagatcccacagagaataaaataaaatccaatgagataaagatgagaaggatttcatgagtctccatgaagaaataaaaaggttagagaaaatatttaatattgaattgtgaaataggtgttaaaggggaaaacaagttatatatttaagatgacctactcagggttatctgttatgacattaaaaataaacagaggaggccgggtgcggtggctcatgcctataatcccaacactttgggaggcagaggcaggtggaagacaaggtcaagagattgagaccatcctagccaacatggtgaaaccccgtctctattaaaaacacaaaaaattagctgggcgtggtggcacacacctgtactcccagctactcaggaggctgaggcaggagaatcgcttgagcctgggaggcagaggttgcggtgagccgagatggtgccactgcactccagcctgggagacagagagagagactccaactcaaaaaataaaaataaaaataaaaaaataaaataaacggaggagttacttcagatcactttctagagacattgccttgtgaattattgtgaggcaacacaactggaaaaattccaggaatcatcttgaccatttttagaagctaaagagaaaacatgatcctcctacatgagaataataatggatggttgagaaaagaaacatatacttgtgagaagcatggagtcataaaaaaaatgtgaggacaggatgaaaacaaatgaagttgactgagaagggaaagccaaggaataaggagaagaaagaaacaaaacaaaacaaaacaaaaacaggtgaagcttgatctgtcaactacagagcccactgcagctacaatatattctaagagaaatgttgccacccactgcttaaggggcagccctgcaatgattattcaaatcattttacctgaatatttttaatgaatcagcatttgatttctaagccaagagtagttactccataaaatagccaactaaatatgatgtgcaagagaagacaagaatgggctgcaacaaccatattatgtctctggaattatattgggcaacacagaaaaaaaaatcagcaatagaaattaaaaattacagacaaaaagatggtagattgaattgggtctatgaatgttcctaataagacaaaagaatgaggacacagacattatggagtagacacatgatataaaagtagaagaaagaatgagtcagggaagaaaatgaaatcaacaagaaaatctgagacatgctatgagaaaaaaagagttcccatggttaaggaagttgtcactacctataattttctttctccctaaaaaaaaaaaaagtggttaaaaaacacataaggttaaacttactgccttaatcatttttacacgtacagctccttaatgctaagtatattcatgttattgttcaacagatctagaacctctaaaaccttttcaacttgcaaaactgaaagtgaaactgattaatttattaatcagtaattctccctccttcctactcccagtccttgacaaccatctttctattttgtttctaggatttgaccactttacatacttcatgtgagtgtaagcatataatagttcagtagtcgtccttttgtgtccctacagatttcttgagtcttgtgatttttcaatgtctgattcaatttgggtccatatggatccttacaagaagtaataaaaaaaattaccacacttgaaaaatatgcaaacaaaacaatttaaaagcccaagtaggactgagaaagattttcctatgattctaggaaataattgaaacatacactttgaaatgacactttattcaacaaaataatattttcaggaatacatgagcccaaatgatggattaggtacttgtgtttaggagagattaaaataaatacatctcacttttgcctggtgccagggaaaaaaaaccttttaaaatactttatggattttaaagtaagcttaatgtattttaactgagcttagtgatttgagggagaatgcaactaatgatggattttttaataatgttttcacagaacattaaaatagattttagttccactcatcttccacaatgataatactctttcccggattaatcttaaaataaagttgatgtatttaatcctgtgtgaagatatcaaatatgcatttcaatgtatcgtaataaaatatataaattatcacatctttgtaaacagtaccactgtacatatataaagatactgctgagctcactggccattgtagactgaggttatgaagtgttttgcaggctttggaagacttctcttcttcatcatagtaaacattgctaaatttcctcttctttggcaaaactagactatcttgcatctcatgaaaatctgtaattggagtttatttagaaaacatattaaatgctatcagagagcttttgtggaagcgctaatgaaaatacatatttaaccattattagacacataaactttcaacaatgaaggtgtgttcataattactatgttgtcattataagaagtaaacattcttttctattaatattaagctgattttttttcaaatatctttctagtcactttgggaggctcaggtgggcggatcacctgaggtcaggagttcgagaccagcctgaccaacatggagaaaccccgtctctactaaaaatacaaaaatcagcctggcatggtggtgagcacctgtaatcccaactactcaggaggctgaggtaggagaatcacttgaacctgggaggcggaggggtgcagtgagccgaggtctcgccattgcactccagcctgggtgacagagcaagactccatctcaaaaaaaaaaaaaaaacttattagtgacatagttgataataactaaaaacaaatgtctgatagatgacctatgggaaaattgagtgaactatagggacaaaaaaaaaatgagtttgatgagcacttaggttgcttgcagtatgtaacaacaaaaaataaaaataaaaataaagaaattaatttaaaaaatgagtttgaaaatgtattattatgtgaaatgctttccacaaagaactgactacgaaatatttggaaggtataccattggtctttgcaggatcattgtgaacctattcaggtaagtgacttttggatctgggatggctgggctggatgataagagaagggagtagctaaatttaggttatacatgaggtcaggttgtgcatgtagatggtatacactagtggggtctggatcagagacaagggacttttgagggaacagaagtgaagcaggaagctgtctaggatatcatttccactcctgaagaatcaaggtccaaatggcaagattatttgtaagcagaaaaataagcagggcacagatttctctgacatactggattagaaaaagcttcttgcaaagataacctataatattcaataattcttgaaaaaagtgttactttgaataaggaatatttatcctcaaaccctcatgggtctctttaaatgtaaaggagtgttgcttattaatgttaaagttaggccccaagtcattatacagaatggaaagtttgacatggtgtatagaagagttgtggactaggagtgctaaaattttggtcctgtagcacttcattttcccctttttggacaattcattattatacaagtggcttactgctcttgaggttgatctagaatcgaggcctccgtactcataatggaatagaaattccatggtaagagagaccttagaaacaatcttatttatgcttctcattttaaagagtgttattatgaagtccaggcatgataatattcccagacatagaaaccaagttcctctcaattaactgctctgtctctctcagagaaatgagtacaataaaagatattaaaaatctcaagagttcatactagtcttcatcttctaaataccccagctcttatatcaggtcttgatgagagagaaagagatagaagacatacatttgggcaataactcaaaaaagttaaatcaaacataatacacagaaggtcaaggaaaagctcctctagagtaaaaattttaagagacacagttatgatgaaaatggagttacactaagttgaagcaaaaccatttaccaaaaatacttatttagattaattccatattgcaaaaaaattgccgacacattcaaaaatgtagacttagtgtatctcttaatttactgcaagctagaaaacagcatatctataaaaataaatggcaattctggaaaaaaaattgttgtcgaacagcaagggacaaggtagaaactagtttaattctgtcattttatacataaagaagctaaatcccttagaagtaaaactgattgtcctaaatcacaccaagtaaagatatgaatttgagtctcctgatgtcatgctaaagcacaattttatcaagcacacttctatcaacatgtttaataaaagcacacttttatcaagatattactctgttaaaaaatagaaatcaggaggagaagtagaaaggaaagaaaataaaagacatagtgtagtgcagaagcaagggccaagactcagaatctgataaactagaagtttctgaaaaccttaaatatcaaaaaaatcatgtagaggaagttaagacaaacaagttcttaattgaggctgttagtaattgtttccagaaattgagattcatgacaagtgtcatagactacaagaatgcaaattctgattcagagaagacactcttttctccacacccgatttaggtgtaggaaacaccagctctcaaatattactcttgggagacaggactcagggctctcaacttgaataccagttgtaactgagtagaaacagaaattgtagaattcttgagtttttaatgaattacaaaacccccaaaatcaggatatcctatttttactcactattaatcctttcgttgtttttttgtttttgttctttattgttgtttgtttgtttttgagacaaggtctcactttgtagcccaggctgaaatgcagtgacatgatcatggctcactgtagccttaacctcttgggctcaagcaatcctcaactctcagcccccagagtagttgggtctacaggcatgtgcctcctaacctggctgttttttgtttttttattttaattttttttttttttttttttttttttttttgtagaaacaggatcttaggttgcctagcctggcctcgaactcctgggcttaagggatccttccactttagcctttcaaattgcctggattacagatgtgagccaccatgccatatcaatattaattctaaagctagaaataaaatacattttcaaaagtttatgttttgtttttctttgactccactagaaacatggaaagaaaacatgctattgtacatttgctgtaagtatttacgtgtaaataaattctctctaccaataataaactaaaaatattttcaaatattgagaatagcacctaggtataattattttcttgatttattgtataaggcacctaactcaaatcaaaattatttctgttttgaattttaaaaataaacttttctataaaaattctgagaattacctggttcaatttttagctttaatatttgtgataaatctctagagttttaattttgaaagggcaataaacatacattattcaatatgattttgatgtcttaactttgatgtaacaactgctactataattaattcagaaagatctcttgtcaatctgcagattttttaatatgtaaatattaccaggcatcaataaaaatagtccatacaacatattaactcaaactccatcatttcagtatgtataatcatttggccatgattgaagaaaattttatgtgagcacgcacaaacgcgcacacacacacacacccacacacacacacacacgatcttttcctcattttagaaataagtattatcctaagcaaattaataatgtaaaaaaatttatgtagagaatgccaacctgccttatacactagcttttggaacattcacatataacttatttgtatgcaaagaaatatttcataccatatttattgtatctaaagccaaacctcaacttagcaacttgtaagtggcttaagcacttacagcaaccatgacccttgaaaaaataattcaactctcttgaataatctcataattcattcccttagtttgtatggatttgttaggttttctaatgattccaaatgttttatttattttatctttgttaagataaagaaataatttagaagtatttcaaagcttcaaactcaaatattatttccgtgttgaataattcaggcaattaggttattattttttattttcctggatatcctggatgtgaaaaaacaaaatgccatctatgaagtcatattagaaatagctgtggccaatcttatcttacaaaataataaatcactatgttttctgtgtgatcgagacattctaaattgatttttttttctgtaggaaaattctaaaagcagtgcatttcatatcataattcaaaagcctaatattagtgagagaccaatggaagccatcctaatatcagatcattcgcatttactaatgggttaacaattgtgaagtgttcataaagaaagaaaacattaattctgagagcctaaaatttctataaaactaggtattttctcaattcaagtattgttggtgtgttgtttttatttgtagtgcacaaatatttagccatggtcacagattacatgtcacatacttaacagagccagaaaaacaagtttagccttgatcaagtatttcaccacccaagatgatttattgtccttgaatgtagatttagataaaataatgataaagtactgatacatcaggctattatcagatgttataatttatatggtctacactgattttgttctctgtaggacctaatacacatgctctcagatttagcaaaaaggatttttaaaagatagtataaaatctacaaaatatatgtcttcatgaaattttataccagcaaatccatgagcactgaactgaggcacaggcagtctatattttatatgttatgtaatttaactcctccatcaccctttaacacataacctcaaccataaaatctaattttcttctgtttcaataatttcaacatgataaagaacaaaaagttacaactctttctattgccttaagaataaaaatcaattttccctagtcaaagacaatataaaaaaaaattgaaatacaatttttttaaactcacagtatcagcaaatagggttttaaaaagcatagttcctttgctttctgatagctgaaaaaccaatgaggacatctttaaaacaacttatatgtctaaaattcaaacaaacatctagagacttatttaagatttagaaaagggtgcaatctagaaaatcagctatagattatatatctgaataaagaagaatgaattctctaaaaaaatttattgttttattcttctacttctgattgtacggtagactaaacactcttaaaatttcttccattttattttatttcttattatttttattctttattttcatcataagacggtagagcttcttccattttaaatgtggaattagaccctgtgtgaaacagaatcttattacatattatgactagcaggaaataaaggaaattatcaaccctcctttcaaaaagagttggaaggcaaatatatgagcaggaacagtaatgaatgcaaatgtggcattatcctgaagataattatacaatacatgctactatctaaagactaagctgcaagtcagtggcaaaatgggagaactgtatttagaactcctcctccctcactaaacctgggacactgaaagggccctaaaatgtcccctcttcagtagcaccccccatacctcctagaagaagtaaaggaatgagagcatcacttaggctacagggatccccatgacttcaatcaatcaaaattgcatttacaataaaacttatgaaaccaacaaggaaacaagctagcatttatattttaaatcgcttacattctaggccagttgacctagtagaaaaataagtcaactggcctagaatgtaaatgatttaaaatataaaacataaaataaatgtgtacaatttaaaaatatgaaataaaaataacaaaaatgatgaagcaacaggaatctacaataaatgaacaagaaaatttgaaaaataatcaaatagaacttcaaggaaaaaaaaggattattactaggaaaacctaaatgaatgggttactaaaaaattaaggtaagaagagaatgaacaaactaatgaatggaaataattaatacccagagtgcagcagagaggcaaaaagatgtaaaatataaaactaaatgtaagagttggagaattaaaagtctaattgacaacaagaaatctcaaaaagaaataatagatgccaggcacggtggcttatgcctgtaatcccagcactttgggaggctgaggtgtgtatcatgaggtcaggagttcaagaccaggttggcaaagatgatgaaaccctgtctgtactaaaaatacaaaaattaactgggcgtggtgatgggtgcctgtaatcccagctacttgaaggctgaggcagagaattgcttgaatctgggaggcagaggttgcagtgggctgagattgcgccactgcactccagcctgggtgacacggtgagactctgtctcaaaaaaaaaaaaaaagagagaaaaatagagaggaaatatatgacattataaaatctgagttttatttgttaaaaactaataacaaactaataaagtatacttttcaaagggtacatgggccacaatgtatataagaaaattatttaatatattctattaaaactagggtacgctaaagacagaggcaggacctaagcttggagccagagaggaagaagaataaacagcataaagccagatcatcaacacagaaccacaattatcatagactgacacctgatttctcaatagcaaaaaagaaacatggatttttaacattgtaaaagtcgctattactctggaatgcggtacctagcaaagctgtattttttaaatgatagttatcattttcagttaaataaaataattgttatgcaattaaacataacttagaggaaaatccatagcatttaattctctcatagcatttaatgtttatatttaaaaaatacagactttaaaacattaataagggaaatgtatgtaatgtaattttagggaaaaagggcagaatcataaggaagtcacagaaaggaaatcacagaaatcataaagaaaaacatattaaagatatgagcaaaatttaataaaataaaataaaaacttatagaatacagagactcaacgaagtcaatagtggttatttgaaaaattaacaaggtaagtgaaagagtaacgaaatttatctagctgactaaatttttaaaaatgcatatataaatagatttataacaaaaagggcacataactagacacatgcaaatgattaaaaatgagtattaagaacaacttttgtcacttaaattctaaaaattggacgaaatgagtgaatattcagaaaaatgttagtgaaacttaagagataggaagtctgaagaaacagaaatttttaaatactttcacaaatcaaacatctgacccagacagttttacaaataatttctactaaattttcaagacataaataatttcaatttatacattattctatgtaacagacaataagggaagattctctagctcattaaatgaggccagtgtaaacttgattccaaaattagacaagaatggaaacaataaagaaaattcagtaactaatgataaagacacacaaatgttaaacaatgctatggcaaactgaatctaacagttcaatagacagaaaaatggcccccaaagatgtccttgtcctagtatccagaaccagtatgtatgcaaccctatataactaagagactttgcagaggtgattaagttaagaatcttcagatgggaagattagcctggatggcccaggtgggcccaatgaattcacaggggtccttataagaaaaaccggagggcagaaggatcagagtcagaggagatgaggcaacagaagtagagttcagacacaagggagatttgaagacattatgctgctgtctttgaagataaaggaaagggccatgagccaaggaatgcaggcagcttctagtagctggaaaagacaagaaaatggattctccactaaagcctccagaaggaacagctctgttgatagctttattttggcctagtaagatcctcttcagaattgtgacctctgcaactgtcacaacggtaagataacaaatgtgtgtttttaagacactaagtttttagtaatttgctgcaacagcaatagtaaaataatacaagtagtctgtttatgtgtgtgtacacccgtcattaacaagttgtgtttcccccaggaatgtcagaagtatttaacatcagaaaatgtattaatgaaaatgtaccatatttgtagcttaaagggagaaaaaaactgtattacaacagattcataaatatattctgattaaatataaaacccaattataatttaaaacaaagtctatagcagctaataatagaagcttctttaacctaataaaagggtatatatgaaatatgtatagaaattattcatcttaactgtaaaacataagcgtcactttctttaaaatcagagacaagtcaaacatctctaccatcatcacttatactgtacaataagaacaaacataaaattaaaaattaagaatctgagaaaaaacaaggcagttatttttatgattttctgtgatctacacagaaaaccttaatgtatccatacataagttactaagaatacatattagcctagcaaggtggctgactatatcaataagtttccaaagcccatcacatatatcctagtgtgatggacagcctctagaagaatcctacataatttctacctctggtattcatgcccatgtataatcccctccttctgagtgtgggctgaacctataacttgttgtcaacgaacagaaattgtcacaggtgaggggatgtcacttccatgattgagtgatattacatgacacttttttctagcagactctccctacaaactctccttgtttgcttgattaaataagcctgccatgtggtaaagaactgtgggaaatatctgggttctattggcagcctgtaggaactgacagtcacatccagctgacagccaacaaaatattgggccccaagtcctacacggggaaataaatactgccagaattctcagtgagcatcaaagtgaattcacctggaggcaagcctccagatgagaatgcaacccacaggcaccttgcagccttgtgagactctgagcaaatgatcacagcaagtcatatgtgaattattgacccatgaaaactatgtatacatgtgtgttgttttaagctgctatatttgtatatgtgatacgctgcatagaaaactagtgcaactaatcaccaatagctttaagagtgcattacaaggccaaaaaatcagtataataaatctatgattaaattttttattattatataataaaaaagtgtaagaaaaatgtagcaaaaagtataaaacacgatttaagtaagttgaaggataaataagtagaatgctatatcatgttcattgatagttcaactcagtcataaaaatgccaattcttccctattttatctatagattaaataaaatctaataggatttttgagtgtgctgacaaattctaaaaataaaagaagacaagtataagaatggccaaagcatttctgaagaaaaagatagaagtatttttaagcacatatcaaggttgtttatcataaagttgttatgaataagagattgtggtaatgacactctgaaatcaaatttatccagtggtaaagaatagagaaaccagaagcaaacctatgcagctatagaagcaataaaatagagatttcattgtaacaaggggtgaaaagaggaaagatttaataaaaatgctaaaattatttgtcttcttatataagaagacgaaaattattacagaagatgaaaatgaacaaattaattaaaggtaaaaggcataactttaggacaatatctctataaatgcaggacattgaattgtttcttcaataaggcacagtaacactaaccataaaatacctaccaattaaactacaataacattaaaaacttctgtttgtttaattattcattcaacaaatatctactgagtgcctagtaccaaatagtatattctaggcattagatacataacagtaatcaaaacaaatccctgccttggtgaattttacattctagaaagaaggtaaagaaagaagaaataagatacacagtatgtatgctatatggggaggggatcattaaggagtgagggagcaattgagccactggagaagagttattatattgaagtaaccagcaaagattcactgagacatttttggcataaattcctgaatgaagcaagaaatcgattttccatgtagtcatctggggaagcacgtgccagtcagagggactgcaagtgaaatggcactggcgtagcagcatgctttacgtgtccgaggaacagtgaggaggccacctgcctacaaaaggatgtatgaggagagtaggaggaaacaggtgaaacagtactggaggccgtgtcacaggggattcttcagtcatactaaatcatttgaattagattcttctgagtaaaatgaggaatcatcagagcattttaggaaaggagtaaaatgatctgctcacgtaaaactagatccttctggctgttctaccataagaagattaaagaagggcataaacgtctgttagaaagctactgcaatattccaggcaagaaataatggtgcatttactagggtagaatctgtgaacacgaagagaagtagttagctaatcaaataaccaaacatggagaacataatcatgtgtcaatgagtttacatccaaaaaatatatagaactctgctgaatcaataaaaaacccataccaaaaatagaaaataaaacatttttacaaaataggaaatacgatttcccgataaacatagggaaagatattcaacctcatctgaaatcaggaaaatgcacactaaaactaaagtgagatgcaattttatgcatattctattgaacagattaatctgacaagagttggcaatctgaggatcaacagaaactcttaggtactcctgatgacaatgtgattttacaacagctttgggaaagcaatttgggattatcttataaagctgaacatttacacaatctaccaggacccaacaataacgctactggggttacaccttagagaaacttgaacatgtttagcaggagacatttatagaatgttaatagaaacataacttaaaataggaaaaaataaaataaaataacaaaaacagcagacaatgtgaatatatataaacaaaagaatagatacattattcacttcatgaaatattatatagcagtggaagggaggccgaggtgtgcagatcacaaggtcaggagattgagaccatcctggctaacatggtgaaaccccgtctctactaaaactacaaaaaaaaaaaaaaaaaaaaaaattagcttggcgtggtggctcacgcctgtaatcccagcatgtggatcacgacatcaggagatcaagaccatactgactaacatggtgaaaccccgtctctactaaaaatataaaaaatgagctgggcgtggtggcgggtgcctgtagtcccagctactcgggaggctgaggcaggagaatggtgtgaacctgggaggtggagtttgcaatgagccaagattgcgccactgcactccagcctgggtgacagagtgagactctgtctcaaaaaaaaaaaagaaaaaaaaaattggtatggcacaggttaatgtgattaaattataaaaatataatattgaagaaaaaatcatagaagcccatcataaaatgacagcattttgtataatgcccaaaaccaagcaaaaattaattatataattaatatatacatgcatacatatatatatacataaacacagacattacatatatacatgtaagataatatatattccacatgtaaaattaaaagaaaaaattataaacacaaatttacgtggcttcaatagtgtttatagtattctagttcataaatatagcctcacaggtattcatttcattaatgtgccataacttacatctaaataatacacattttgtacatattaaatattacacaaatataaattttcaaagctataaatttacttgatatttgaatgttgaatgttccttaggttaaaattaaagtggttatgatatttgacaatataccaatttgagatgaaagtaatctgaggtcttcttaggtgatcaaacatgaataaggaactcaattttggattaaagttatgacatatgtaagtatcaaagtacattatatacatcctttttcacctgcgaaattaaatttacatttctcagctaatccattctgagcgtacttgacataatttatgctccctggcataattgttctagcctgatagatcctataatgttttttatttagtacttttttccaaatattgtaactatgcccttatgtgtccatattacacaaaccttgaatttctttagcatataaatggtcctttatacatctaatgccaagtaacttatctgtagcacaatccataaatatttgtggaaagaaaataacaaatcaaaatgttaaactgtaatggcttacttaagttaatcatttcaaatctttggcttcattgtgaagaattcttagttgaacatcatactgtgaagtgaaaaagactaggtttaacatatctttatgttctttaataaatttggagtagtcagggaatcacaaacagtgatatttagtttcagtatatctactaccgatatttatatttttgacatcatgatttcatgtcttaacgacactgctgtttgtaagattagtctcattaaacatattttagtatctgctctttctcttctattgaattgctctttctcttgtggtattgaacaggttagatgcaaaggtgaaagaagtcaatataatagatggaagctgaacagaagaattggtaaattttaaatccactgtcaggaatgatagcttgcaaagtacaatttaagtgaacatttcagaagttaagatacattagacatagtcattacctttgaggacattacggtctgctgttcacatacagataaagagctaaatttgaacattattaaatgtctgacattattttttaagataatgtggtccttgaaggattcagaaaaacaatatgagatttctttatgatggctctttaagctaatactttatagtatgtggcaaggatagaaaagtaaaaattcaaagaacacagatgatatctgaaataagccaatggtctctataaacagaaatggaacagaaaagtgaagcaggacaaaaatcaagagatggctacaagtctgccacaagcctgcacgcagaaagaaatgactaagagtttggcttctgtggggtaaaaagtacaaaattagctatgtaagtgtctggctttagcaaatgaggggttgagatctttattattcatgaaagaaaaacaagtaggtcgggcgcagtggctcatgcctctaattccagcactttggaaggccaaggcaggcagatcacaaggtcaggagttcaagaccagcctgaccaacatggtgaaactccgtctctactaaaaatacaaacattacccaggcatggtggcgtgcgtccgtaatcccagccactcaggaggttgaggcaggaaaatcacttgaacccaggaagcagaagttgcagtgagccgagatcacaccattgcacttcagcctgggcaacagagtgagattctgtctcaaaaaaaaaaaaaaaaaaaaaaaaaagaagaagaacaagtaaaaccactgtatccaagtaaaaccactgcatccctgtgactaaggctcatgttgggtttgtacctagaaagaaaaagaagcaagcattacctccacttgagaaatgaaccaaactgagccaaaaatggaatgaaacaaaaattcagttactagactgataacatctctactctgttcacagtgtggctacccctattcaaacaagttaataagacctgtttatgaaccaggaacaccagaagtctaatttgagttaacgaatgggtattgactgggagaggagttggttataaacacaccacacaggaatgaaaaaataaacatgaacactaaacaatcaatgagaaataaattgcttcaaagtcaaaatgagactaaaagcaaaattctaaaacacatagaaaaaacttttttttcttttttcaagatggctaactacggatatcagatgccagttcttctcagaaagatttagagttacaagtggtgaggggggctatatttagccctcttaaaaaatgccaacaaataattttatatcatgctaaactaagcttcataaatgaaggaggaataaagcctaacctagaaaagcaaatgctaaggaaatttgccattactaaaccaattcacaagaaatgctcaaaaaaattaaacattgaaaggatgatacctactaccataaaagcacacgtaagtacacagttcacaaatacctataaagaaattatacaactgagactacaaggcccatagctaacagcactataacaggaacaaacttcacatataaatactaaccttaaatacaaattgccaaaatgctccacataaaagatacaaatgggcaaagtggattaaaaaacaagaccgaaacatctgctgcctacaagagaaacacctaatgtgtaatgacaccctcaggctcaaagtaaaaaggtggagaaagacatatcacccaaatagaaaataaataatagcagtggctgtattttgtatcaaacaaaaacaaaacagactttaaaccaacaacagtaaaaaaaaaaaaaaaaaaaaaaaaaagacaaggcactctgtaatgataaattgttcaactcaataagaagatttaactatcctaaaatatacccaccgaacactggagtacctagatttgtaaaacaaatactatcaggactaagaaatcagaaggacagccatacaataattgtggggaattttaacaccttactgacagaagacaggactagacagatcatcatcatataacactaacaaagaaactatggatttaaactggaattttgaccaaatggatgtaatagaatattcaagccaacaaccacaaaatatatgtgtttctcatctgcaaatggaccactctataaaattaaccatatgctttatcataaagcaagcctcaatacattcaaaataattgaaataataacaagtttcaccaaagaccacagtggcataaaattagaaataaatactaagagcaactctcaaaaccacacaagtacatggaaaccaaacaactctctcctgagtgacatttgggtaacaaagaaattaaggtagaaatcaaagaaaaatttgaaacatataaaatacagacacaacatagtaaaacctctgagatatagcaaaagtgatgttaagaggaaattttatagtgctaaaggcctacatcaaaaagatgaatctcaaattaacaacctaacatcacacctcaaggaactaggaaacaagaataaagcaaacttaaagctagcagaagaaaagaaataacaaagatcagaacagaactatataaaattgagaccaaaagaaccatacaatgaaatcaataaaacaaaaagttggttctttcaaagaatatacaaaattgacagactgctagccagattaacttagaaaaaatagaaaagatgcaaataatcacaatcagaaatgataaggtggcattacaaatcataccatagaaatacaaaagattatcagagacgactacgaatatctctatgcacacaaaccaaaagacttaggcaaagtgtatacgttcctggaaacatacaacctcccaagattgaaacaggaagacactgaaaccctatacagatcaataacaagtaatgaaattgaatcagtaataacaaaattctaccaaccaatggtagattttcagatggattcacagctgaattctaccagacctacaaagaagagctggtaccaatcttactcaaactattcccaaaaaatcaaggtgagagattctcccctaattcattctatgaaaccagtatcatcctgttaacataatctggcaatgacacagcaaaaaatgaaaactacaggccaatacctctgatgaacatagactcaaaaattctcaacatagtactagcaaaacaaatccaatagcacatcaaaaagataattcatcaccatcacatagattttatcccagtaatgtaaagattgttgaacatatgtaaatcaaaaatgtgattcaccacattaatagaattaaaaataaaaactatatgataatttcagtagattcagaaaaaaggatctagtaaaatcccacattggttcatgaaaaaaaaaaccctcaacaaattaggcaactagggaacatacctcaaaataataaaagccatatatgacaaacccacagacaacaacatactgaatagagaaatgttgaaacatttccccctagtaactagtgcaagacaagtatgtccactctcaccaatcctattcaacatagtactggaggtccagagcaatcagataagaggaagaaatataagacatccacaatggaaaagaagtcaaattatctctgctgatggcatgactttatacatagaaaaccctaaagtctctccaaaaaattcttatatttgataaaccaattgtgtgaaattttagggtacaaaatcaacgtacagaaagccgacgcatttctatatgccaataacaatcaagctgagaaccaaatcaagaaagcaaacctatttaaaatagatacaaaaagataaaatacctagaaatacatttaaccaaggtggtaaaagacgtctgcaaaaaataaaaacaacaacaacaacaacaacaaacaactacaaaacactgatgaaagaaattataattaacgtaaacgaatgaaaaatatcccacgcacatggcaagtattagtcattattattaaaacaactatactacccaaagcaatttacagattcaacgctattcctatcagattaccaatgtcacagaattagaaaagacaattctagaattcatgtaaaaccaaaaaaagctcaaatagctaaagcaatcataagcaaaaagaacaaagctggagccatcacattaactgacttcaaattacaatagaaggctataataaccaaaatagcatggtaccaatacaaaaatagacacatttgtcaatcgaacagaagacccagaaataaatacatgcacctacagcccactgatcttcgacaaagtcaacaaaaatgaacaatgggaaaaggatgccttattcaataaatagtgctgagaaaaatgtctagctatatgcgtaagaatgaaactagatccctacattttactacatacaaaaattaaatcaagatggattaaaaactaaaatatgaaacctcaaactattaaaatcctagaggaaaacctactgaataccattcttgacatcagctttggtaaataattttttctaagtttccaaaaacaattgcaacaaaaataaaaattagtaagtgggatctagttaaactaaacagcttctgcacagcaaaaaaaaaaaaaaaaaaaaaaaaccaatggggtaaatagacaatctacagaatgggagaaaatatttgcaaactatgcatccaacaaaggtctactaatatccagaatctataggaaacaaacaactcaacaaacaaaaaacttaagaagacatacatccaggcaacaaatatttggaaagatgttcaacatcagtaaccattagattttataataaaaaccacaatgagataccatctcaaactagtcagaatagctattatttaaaaagttaaaaaaagaacaagttgatgaagatgcagaagaaagggaatcactgtatattgttggtgacaatgtagattagatcagtccctatgaaaaacaatatggagatttctcaaagtaataaaactaccattcgactagcaatcccactactgcgtatctactcaaaggaaaagatactgttttagcaaaaagacacctgcactcatattttatctcagcactattcaaaatagcaaagtcccatggaatcaaaataattgcccaccagtgtttgactggataaagaaaatatggtaaatattcaccatggaatattacactgccattaaagaataaaatcatgtttttgtttttgcagtaacatgaatgtagctagaggccattatgctaagtgaaataactcagatatagatcaaatactaaatgttctcacttacaaataggagctaaataatgggtacacatggatacaaggatgaaaatactgaggactccaaaagtggagaggacaggagggtgcaagggttgaaaaaaactaccttttgggtaaaattttcactatttgggagatgcattcagtagaaacccaaacctcagcattacacattacatccatgtaacaaacctgcacatgtcccctctgaatctaaaataaactaaaatagataataaaatacaacatatagaaaaatattatgaaaaatagtcaacaaccagaagatgattttagtctgcacaatattaaaataatgaaataaaactccaagttgttcctaaaacacgtcaagagataaatcaattctttaaaatggaacaagatattaaaaaacaaaatatacaaataattttaaaagaggtagataagaaaaaatgtatcacaagtgttataaattaaaatatatatctatttaaaatgtaaatcacttgttaaaacttactctgccaacctagatgaagtaggtgtattagactaggcctcctgccattaaatagaaatgtgtaacattgaacaaagtataatgggaactacataaatttgattccttagagaaggaaaagaaatagttgaactctattattgccctagattttcactgagaggcactttttatgccataacacaaggagaagatacctaagcatccagaagacctatgcaatgtttgaggaggtgaaggtggctagaatttgtggtgcagagtaatgggaggtaattagttatttaaaaaaaaaatccctctgggtacacagtaggtgtatgtatttatggggtacatgagatgttttaatctggcacaccatagataataatcacaaaaagagcttaagagagcttacatgaagctgagacatttcagttctgaattgctaaattggagaccctcattgaagaaccatagagtttggtaaaaaccgttgaaaagccatggattgaaggaatctggacctccccaaaaagtgtaaaataaatctcaaaatgattcacaaataaccacctgccagaacaagatctgtacgttttcatgtgtgtaagacacggagtctcactctgtcgcccaggctggagtgcagtggcgcgatctcggctcactgcaacctctgcctcctgggttcaagtgattctcctgcctcagtctcccgagtagtttgggactacaggtgcccaccaccacgtccggctaattttttgtgtttttagtagagacggggtatcaccgtgttagccaggatggtctcgatgtcctgacctcgtgatccacccactacttcagcctcccaaagtgccgagattacaggcgtgagccatggtgcccggccaatatgtaccctttttaaaaattaatagacttaatcttttagagcagctttaggtttacagaaaaattaatcagaaagtacaaagttcccacatactattcatactctcccctaagcacacagtttccatattattagtgttttgtattaatgtggtatatttgttacaactgatgaaccaatgttggtacattattcttaactaaaatctatagtttacattaaggttcacgttttgtattgtacattctatgggttttaacaaatataccaaacatgtatccaccattatagtgtcatatggaatagatgcactgtgcaataaaaatccactgctccgccatttgtccctctcttctcccccatgatttcttaacaagtagtgaccattcttctatcctcacagttttacctttttcatacattgtttttacataaatcctttctcaggctctgctttggggataacgtaaactaagtgtatgtgttaaaaaaaaatattggagaagaagataactaattagttgctgggattttaaatttttttctggatacatagtaggcgatatatattgatccggtaagtgagatgttttaatacaggcatgcaaagcataataaacacatcatggagaatagggtattcatcccctcaagcatttatcctctgtgttacaaacaattcaattatactcttagttatttcaaaatgcacagttaaattattgactatagccaccctgttttgctatcaaataggtctcatttattctttctaactatttttggtacccactaaccatcctcatctcctctcaaccccaacccccaactacccttcccagcctctggtaaccattcttctattctccatgtctatgagttcatttgttttgatttttagattccataaataaatgagaacatacaatgtttttcagtgcttggcttattttacctaacataatgatctccagttccatctatgttgttgtaaatgacaacaatgatgtcttttttattggctgaatagtactcgattgtgtatatataacacattatgtttatccattactctgctgatggacggttaggttgtttccaaatgttgtctaatgagaacactgctgcaaccaacatgggagaacagatatcccttccacatactcatttcctttcttttgggtacatgactagcagtgagattgctctatcgtatgatagctgtatttgtagtttttagggaatctccaaactgttctccaccgtggttgtactcacgtacattcccacaaacagtgtacacgtattcccttttctccacattcttttaagcatttgttattgcctgtcttttggaaataagccattttattggctttattggggtgagatgataggtcattgtagttttgatttgcgttctctgatgatcagtgatgttgagcaccttttcatatgcctgtttgccatttgcatgccttcatttaggaaatatctattcaaatctttttcccattttttcaaatcatttcttattcacatctttgcccaaaagctaataattggattattaggattttttttctatgggattatttgagctccttatatattccagttattaatcccttgtgcaaagactcagaataaccaaagcgatcctaaataaaaagaagaaaactgttcttcacagtttttaaaataacctccaaaccgttctccagagtggttgtattaatttgcctttccatcaacagtgtatgaggattcccttttctccagatcctctccagcatttgctattgcctgtcttttggaaataagccattataactgaggtaagatgatacctcattgtagttctgatttgcatttctctgagggtcatttctctgatgatgataactatccttgtcacaaatatagttagcaaatattttctcccattcttcattaagtcccaggggattttcagtcagcttgtggtgaatgctaccttgcctgggactcacccttcagagcaatgggctcctatcccgcccagcacaggtctacaaaggccatccaaaaatcaagtcctggaatcagggacaccaagtgcctgctcggtgctctaaccacttccacccccttggccaagctggtacctgaaaccatcaagtctcaggatttcgcctaaggtcctcagcatagtacctggcactggttattcagggactggggactcttcagttagcaggtgatgaatcctgccaaaactaatttcttcccttcaaggcaatgggttcccttctggaccagggagtgtctacatatgtccgtgagctagagcctggaaagtggccttacaactctgacctgtgccctatccttctgtgacttagtggtatccaaaatgcaagacaaagtcctccttactcttcctgcaactgcaagctgtgcaatctagggttaggggagtctcttctgcaactgcaagctctgcaatctagggttaggggaggggtgatacgatcactcccttagccaccccagctggtgtctcagtaggtcaggtgtcccccaatccactgtctccaaacctagttcaatagtaaacactaggactcccctaggatttgcatgtcttgtggcctagaccatcttttgagtttatttagagccccagcatactttaccccacagtggtgaggtttgccaaaactcaagttccgacctctggaatcagcaattccccactgactggggctggtctaaacactccttctgtagatgagtgtcagctgggtgtgatccagttttcctttctactctaacaggataacactgagttcaatgcctcacagttactgagctctcccatccccagcaacagaaatgctctcctcaccatgcctctgctttcagggggtgggggagggtggtgttggtaattcaagagtattttttctacctattcattgcatctttcagaaatacaaagttaaagccagatactatttgtgctcaccgaatttttggttcttatgaatataattttcttgtgtgtagatagttgttaaattgatatccttgttggggaggggtatgattcgtagagccttctattttgccatcttgcttcactcttccctacctaattacttttaaatagcaaatctaacacacaactttacttagtcttctttccaatgatcccccaaaaatgatttgtatgtatgtcaaataagaaagaagaaaatgtcaacattttagaaaccgtaaaacagcagggacagagataactgacttagcagtagggaagcagaaaagtaactaacttaatttgcaacacatggcatcggatagcacctgaaagaatacctgagagatttcctgaaattattctctaaagactgtaaaacaaaaatccctagattggggcacagcagctatagtggaaagcaagggtataatactaaaactgggcaactgagtgaaaagtaatatatcaatattgggaattccagaatttttctttactgggcttttagaatgcaggcaagcatgcttacattccctagacaaaatactgaaagatagcataagtgagagaatatattaaacagataggtttgaagataatgttgacagaatctctcaggatagtagacaaagaggcaaagagatgggaaataagagaaatgatgagaacattggaagtttaggcgaggcaatatctaattaattgtttagcaagtgatatggtttggctgtgtctccacccaaatctcgttttgaattgtagttcccataatccccacatgtcatggaaggtacccagtggaaggtaattgaatcatagggtggttacggtcttgctgttttcatgatagtgagtgctcacaagatctcatggttttataagggtcttttcccccttggcttgtcacttatccttcctgctgccatgaaaaggacatgtttgcttcccatcctgccgtgattgtaaatttcctgaggcctccccagccatgctgaattgtgagtcaactaaacctctttatatattacccagtctggggtatgtctttattagtatcgtgaaaacgaactaatacagtaagtctcatggacaagttgatgtcattggaacagaggtatattccccaaatgaaatcatcttaactcacataccagtgggtgaaaatataaaattactcattttggcctatacattttggaaatcttgtcacgttacttcaaaaccataactaatgtaattggtcctgaataaattttggtttttatatttgaatatgattgtttctgacagtcttggaacctgcttccaccaaacagctcaccctgctagtatccgtgggtgttggcaagccgtcaggtttacctgtaatgccctgccctactgaactcctcccagaatcttttgccttaatgagaatagactgctctctcagcctaacataagggttctactctctacagctaggaaatgaatgaagttttttgtttgtttgctttgtttttacagattttctctttttgcaaataggagagcaagttaagaggccaacagaagaagtgttgagaacactagatctcaacaaggccaatagtttaggtgttaatgatttatacctattgcagtgattacctcgatgccaataaagtcattgtgttagtttgtacatctgctggcttttcccctgtgccaccactgctcgctaaatacagttgcacaattagagttgaccctgtctataactgagtcaaaatgatttaagtcagtaaggattttatgagggttctttccaacgggatgtagaaatacggaaatagaagtcttctaccttagatttcaggattaaatcacttttataaggaaaaacatcagttatttccaatataacgaagaggaagattcttaattcaatctatgcctatgttagtcttcccagaaactcctttctagatctttgctccctgaacatctgagggctagagctatataaaactctttgataaagcagtgatggagtttctactgctatattaagtgaatcgttcttaatttttagtctttcattccttttttattgtctctagcgaacattggagaccaacagctatctgaacacttgataccatgctccaatctctttgatctcattatctcttacttttgagtcttgattcagaaaaataaatttatgttctctgctccctatttttcagtttcagctatctctgcctccccagttctggcctaccatcaattttaaacaaagtaaatacgactcacacacacataaacacacacaaacacaccatgggtgaccaagagtctttgttagcctgagatagagaagtttccctaaacctgaacatttaatgttaacactagaaaagccccagggaacctaatacatagtggtcttcctatgtacattttcaactaaccttgtgttggttgaccatgttttatgatgattgcatacttaatgatttatgtataacttaatcataactgagcactgactgtgtcatttataaactgtattatatactgggaggtttgggatgaacaaataaaattctgtcttcaaagttctagaaaaagtacacttatatctatagctcatggtctaggtaaaatatatgataatttatattagaaaatatttaaatattctaaagatttatcagatgaaacattgtatgtagttgcagaaattcatagaagatttcacgaacatctaacagataactgagctttacatgcaagtaggaaggaagggtttatgaaatctggaagagatgtctggaatgcagctgcgaatatgaaggcgatagatatcattatattgtacctatacagctgatatctcaggcagaggctattgctaaacaaagaaagaaaaagaggaaaggttaagaaaagaagctttggagcactgagtttggatggaaagagatgaagaaaatactagaagtcaagacagggagagaaaaaagccagagccatgtaaaggtaactcaagagagcaatgttacaaaagtcaaaggatgatgtgcacctagaaggggcacgctattctgacagaaactcaggaaatgttgggtttctgaacaatgaggacattcaactggaattgataataaagaattatatatgtctgcatataaaggcttccctcattttacattgataatctgcttctcaaaatcagaacttctctatgaaggcacttaacaggaacttctatcccataattttaaatatgaaagaacataatgtttaaacaaacaaaacacttaacaagttctttaaatgtaactaaaacacagtaaaacacacggatgtgtatatgcatatgtgtgtgtattggatacaaaatatagcatattatattgaaaatattatatcttaatcactgaacagttagtgtgattgttaacatagataacattttttatatgtatagtttctgcattgtattgtcaatgttgcatttctgctgtgacaggttaaataacaaataacaaaaatgtgagaaatgtgttaggataaacaaaagcaaaactttaatttggcagcttttcattgcagttgtcctacatcacaaactgcagcctccacacatgccacagcagcatgggaaagtacataggcgacacaaacaattcactgtccgtcaaatcctattgtctcaaatgagtcacaaggcctgccaaactgcaagacagctaggatatctagggaagcaaatgattgaattttattaataaatgttcctttgcagaaccagtatgtgcacgtatacattttttcccatagatttatgagagtgtgaaccaaattgaagatttatttaagaaaagtaactttatatttatatctttctatatccttaaaattttttttttcttcccaacttttattttaggttaaagtggtacatgtgcagttttgttacatgagtaaattgtgtgtcatgggggtttggcatacagattattttgtcatccaggtagtaaacctagtacctgttaggttgtttttcaatcctcatcctcctcccaccctctactctcaaataagcttccacttacaagtgagaacatgtagtatttggttttctgttcctgcattaattcgcttaggataatggcctccagcaacagccatgttgctacaaagggcataatctcattattttatagctgcagagtatataatatacgtaccacataatatataatatatgtactatcttttctttatccagtccaccattgatgggcatctagattaattccatttctttgctattgttaacactcccgtgatgaacacatatttgcatgtgtctttatggagaacaattttgattcctttgggtatatacccaataattggattgctgggttgaatggtagttgtgtattaagttcattaagaaatcaccaaactgctttccacagtggctgaactaatttacattcccaccagcagtgtataagcattccatttttctctgcaacctcgccagcatctgttatttttttgactttttaataataaccattctgactattgtgagatggtgtctcattgtggtcttgatttgcatttccctaatgatcagtgatattgaacattttttaatatgcttctggccacatgtatatctttttttgagaagtgtccgttcacatcctttgccaattttttaatggggtgattcgattttcactcattgattttagttctttatggattctggatattagacatagtttgtatatattttctcccattctgtagattgtctacctggtctgttcacaatttcttccccagtgcagaagcactttagtttacttagttttcacttgttaatttttgtttttgttgcaattgctttcagaatctttgtcttgaattgcttgcctgggccaatgtccagagtggtatttcctagatatgcttctttagtttttatagttttaggcttaatatttaagtctttaatccatcttgagttgatttttgtatatggagaaacatgtggatccaattttaatcttatgtgtatgattaacctgttatcccagcagtgtatattgaacagaatctttttcctattgcttgtttttgtcagcttttttaaagatcgtatgattagaggtgtgtcaccttacttctgggttctctaacctattcactggtctatgtgtttgtttttggaccagtacaatgttgttttggttactgtagacttgtactatagtttgaagttggattgtatgatgcctccagctttgttctttttgcttagagttactctgctattcagacccgtttttggttccaaatgaattttagatattttttcttattctgtgaaaaatatcattggtagtttgatacaaatagcattgaatgtgtaaatagctttgggcagtgtactattttaataatattgatttttcctatccatgagcatgaaatgcttttccatttgtttgtgtcatctctgatttcttttagcagtgttttgtaattcttgttgcagagatctttcacctcccgagttagctgtatttctaggtcctttattctttttgtggctattgtgaatgaaattgcattattattacttttttttttcacaagttctctgtctttcactcaggctgagtgcggtagcatgattatggctcactgcagccttgacctcctggactcaggcaatcctcccacctcagggtcccaagtctctcaagtatctgggactacaggtacacaccaccatgcccagctaatgtttaatttctttcatattctctgtgagatggagtctcactatgttgtccaggctggtctcacattcctggatacaggcaatcctccggcttcggcctcccaaagtgctgggattacagacatgagccaccgtgaccatcggggttgcatttttaatttggattttaacttggatgttactgatgcattgaaatgttactgattattgtaaactgactttgcattctgaaactttgctgaagttgtttatctgatccaaaaacctttgggcagagactatgaggttttctaggtatagtatcatatcatctataaagagatatagtttgacttcctttctttctatttggatgccctttatttatttatctttcctgattgctctggctaggacttccagtactatgttaaagaggagtggtgagagaaggtatcttgtattgttctgcttctcaagaagaatatatccagcttttgcccattcagtgtgatgttggctgtgggtttgttacagatggcttttattattttaagttatctaccttcaatgcctagtttcttgagagattttaacatgaatggatgttgaattttatcaaagccttttctgtgtctattgagatggtcatgtggtttttgtttagttctgttcatgtgatgaatcacatagattgattggcatatattgaaccaaccttgcaccaaaggataaagcatacttgatgatgctggattagcttttggatgtgcagctaaatttgttttgctgatattttgctaaggatttttgcacctatgttcatcatgaatattggtcttaagttttctctttttttttccttctttatttctgtaggttattggggaacagatggtgtttgcttacatgactaagttctttagtggtgatttctgagattttggtgcacccatcacctgaacagtatacactgaaacctatttgttgtcattaatccatcacccccttctcaccctttccatttgagtccccaaagtccattgtgacattcttacgcctttgcatcctcatagcttagctcccacttgtaagtgagaacatacagtgtttggttttccattcctgagttacttcacttagaataatagtctccaatctcatcgaggttgctgcaaatgccattaattcattactttatatgcctgagtagtagtccatcatatatatatgtggtatatacatatatggcatatatatgatgtatatatatgtggtatatatatggtatatatatgtggtatatatatggtacatatatgtggtatatatatggtacatatatggtacatctcgtgtgtatatatatggtatatatgatatgtatatggtatatatatggtatttatatatggtatatatatggtatttatgtatggtatatatatggtatatatattttttacagtttatccactcattgattgatgtgcatttgggttggttccacgtttttgcaattgcaaattgtgctgctttaaacatgcgtgtgcaagtatctttttcatataatgacttctttttctctggatagatagccagtagtggaattgctggataaaatggtagttctactttcagttctttaaggaatctccacactgttttccatagtggttgtactagtttacattcccaccagcagtgtagaagtgttccctgttcaccgcatcgacaccgacatttattgtttttgattttttgattatgaccattcttgcaggagtaaggtggtatctcactgtggttttgttttgcatttccctgataattagtgatgttgagcattttttcatatgctttgttggccatttgtagagcttcttttgagaattgtctattcatgtactcagcctagtttttgatgtgattgtttatttttttcttattgatttgtttgagtttattgtagattctggatattagtcctttgtcagatgtatagattgtgaagacaattttatagtatgtgtcatgtgcaaatgagaatctatattctatttttgtcaggtagagtgttctgtagatatttgttaggtctgtcaggtcaagtgtcacattgaggtcccaaatatctttgttaatattctcccttgatgatgtaatactgtaagtggggtattgaagtctcctactattattgtgtggttatctaagtctcttcataggtctctaagaacttgttttatgaatctgagtgcttcagtgttgaatgcatatgtatttaggataggtaagtcttcttattgaattgaaccctacatcattatgtaatgtccttctttattctttttgatcattgttggtttatagccgtttttgtttaagaacatcaactcctgcttctttttgttttctgtttgcttaatagatctttctccatccctttactttgagcctgtgggtgtccttacatgtgagatgtatctcttgaagacagcatacagttgggtcttgtttcttcattcaacttgccagtctgtgcctattatgtagggcatttaacttgtttatgttcaaggttaacatcaattagtgcagattcgatcctgtcgtcatgttgttagctgggtgctatgtagacttgcttgtgtactttatagtggtggtggtctgttgtcttgaatatggttttgtaatgttcagcagcagtctttaatttgcaagtttagccctccctcaattatctcttgtaaggcaggcctgggggcaaaaaattatcttagtgtttgcttgtctacaaaagattttatttctccttcacttgtgtagcttagtttgaaggatatgaaatttttggttgtaattcctttactttaaggatgctgaatataagcccccaatctcttctagcttgtaagatttctgttgaaagggccactgttagcctggtgggattccatttataagtgacctgccccttcactctagctgcatttaatatttttttatttcatttcaactttggaaaatctgatgacaatgtgtcttgggaatggtcatgttgtatagtgtctaacagggattgtccaaattttctcaatttgtatgtcagcctctcaagtgagattggggaaatttccgtagacaatattcccaaatatgttaccaagttgcttgctctctctcctacttaagcacccagcagatggtgtttaatcacaatcacaggtgagtaggctcttgctcagcatcgcagatcctttgtatttacttgcatttgcagccatgctacctgtcagtttttttagggtgtgaactcctctgccacttgagtgctggctgcagatattggatttatcctttaatttgcaaaaaaaccatatgtgttttttttactttaaataaatcaatagaattaatcaaaaagcaagaatataaacatcatttattgcattttctttaaacatcaatattttcattatacatattttattaatgagttttcagagtagaattaaaaacaataagattgcaaacttgaaagcagggaaaaataattatttgagaaataaacaaatgtggttaatataaattataggtttacaaattttaacagtgagataaaaataggtgatgcttaaaggaaaaggatgattaaaaaagaggttcttcccctaaccccacaagcattaggagaaatacctaatgtagatgatgggttgatgggtgcagcaaaccaccatggcacgtgtatacctatgtaacaaacttgcacgttctgcatatgtatcccaaaacttaatgtataatgaaaaaaaaaaagacttcaaaaaaaaaaagaggctcctttttggataggagggatgatacttagaagcaggaaataatattttagtagagagggagctattagagattggaaatataaaatgatgatgcttttatgttcaaggatataaaatctttgacaagaaattagaaactataaaaagtgttagagacaaaaaattctaaacagaaattagaaaaccaggccaggtgcagtgactcatgcctgtaatcccaacactttgggaggccaaggtcagtagtttgagaccagcctggccaacatggtgaaaccccatctcaactaaaaatacaaaaaattagccaggtgtggtaatatgcgctcataatcccagccactcaggaggctgaggcaggaaaattgcttgaacccaggaggcagaggttgcagtgagccgagatcacgccattgcactccatcctgggcaacagagcaaaactctgtctcgaacaaacaaacaaacaaaaaaagaaattagaaaactgaaaaaaatgtattaacaaaattaacaattcagtagatgggtttaacaggaacttccagctaatgtgaaacgagtgaaatagaaaataagtcaaaaatacgcaaaggaagcagaactacaaaatatgaagagtggaaaaaaagaggaagagagtgagtgtgagaagaagtgcttgtgtgtgtgtgtgtgtgtgagagagagagagagaaagagagatagagagagcaagagagaacagtgagaagttacaactggaaaccccaaaaagagaaaagataaacacttttgcaggaagaatatttgaaaagataaaggcagagattttccaggaaatgctggaaatactaaactgcagatttaggtaactcaacaaacccagctaagtgagaaaataaatccacactcagacacacctcagtgaaatcatgaaacagaaaaatcaaattaaaaaaacttaaaagcatactcaaaaaaaaaaacaacccacaaaactccttcaatcaaaagagaaacaaataaaacacttcaattcaaactacatttcttcatccaactaaaaaaacctttaagaataaaagtaggccaggcacagtggctcatacctgtaatcccagcaccctgggaagctgaggcaggcagatcacctgaggtcgggagttcaaaaccagcttggctaacatggtgaaaccctatttctactaaaaatacaaaatatcagccgggagtggtggcgcatgcctgtggtcctagctactcaggaggctgaagcaggagaatcatttgaacctgggaggcagaggttgcgttgagtcgagactgtgccattgcattccagcttggacaacaagagcaaaactctgtctaaaaaaaaaaaaaaaagaataaagataaatcttatttaatccaaaaaacatatgcactcttcttagcttttacttctgccttctgtttatcaggaattacatctatttacctttctataaatccaaatggtactattctttgaaggccagacgtgcagactggcttatgccaatttagtcattctttctggaaagtaaatggcagaaatttaaaagtgtgataaccataggaaagcaagtcacataaaaaattctgtcacataacaattattttaaaaacatttgctatcaagtaagcacaaaacagtaaatataatctttccatgaactcaatataattctagctctttgttgtgtttttgtttttgtttttgtttttgagacggagtctcgctctgtcgcccaggctggagtgcagtgtcgcgatcttggctcactgcaacctctgcctcctgagttcaagcaattatctgcctcagcctcccaagtagctgggattacaggtgcccaccaccacacctagctaatttttttgtatttttagtagagactgagtttcactgtcttggccaggctgatcttgaactcctgacctcgtgatccacccacctcagcctcccaaagtgttgggattacagatgtgagccaccacgcccagcccctctttgtttttaggttacacaactacatcaaaagattcactcaaggcagatgcaacaatattcaagaggtgttcgttctgattatggcattcaaattcacctagaatttggtgtaaacttaactaactcattaactcatacagaccatggcagtgtctatgtttaagtacttttacataaattgcatttgtctatatgctaaggattccaataattattaatttcaagatgaatttaacttaaactcccctggatttcaaattaaaatgaacaaattgatatttctaaattactgatttctgaaagacacagggaagatgaaagccctggagggagagatccgtcagtctgtgagtcattacttcatatatacagatcccagaaggattccactaaacttccctttttccaagaggcaggggccagagatgaaaataggctattaaacaataatgtagaaaacaaatctcagtcttaataatgatttcaggattcaaattctgactggggagcatgaaaagcttcaggctaacttacacttgtcattaattccaagctaaggccaaggaccttggtaattaccgagaagttgtacttagtcacgcaactataacagagtattctcatttttctaagagatagagaataagggtttttaaaattatttgtttgacttttttctccttttgctttgttccccacttcatgcttagctctttacaaatgcaaatataaccttttaacctaccagacactccctacagggcaaattcatctaactaggagcttggaagctccagagcagagctgcctcccaccaggagattcccttgagagacaacagtcaatttacaacccaaaatatgcttgctatgaaatgctctcccatctggagagtttcagccacttttacaacctagttctgcccgtgaaggcaccagcttgacaacctggtagataaagcaccaaacagagttacatgaaccccacacctgcttgttccttccactgcatgccatgcattccaagccccctttacaaagtcctcactttctgctgcaaaggcaaagtggtaaccttaagtcaggaattctgtacttcttctcttagctagctttggaataaaaagtcactttctttataacagacctgactgttgttaattagactctgcaagtggagagtaactgaacctgtgtttcagttacaagaccaagaacaaatatttatcaaatgtaataaattaccaaccatgggttaacacttgttttaaaagtattattgtatctaggttcacaaataaatttggaatatgtcagacctctgagcccaagctaagccatcatatcccctgtgacctgcacactatgcatccagatggcctgaagcaactgaagatccacaaaagaagtgaaaatagctagttcctgccttaactgatggcattccaccattgtgatctgttcctgccccaccctaactgatcgattgactttgtgacaatacaccctccccacccttgcgataatggactttgtgatattcccccaccccgtgaatgtactttgtatgatacaccctccccacccttgagaaggtattttgtaatatcctccctggcccttaagaaggtactttgtaatattctccccgcccttgagaatgtactttgtgagatccaccccctgcccaccaaaaagttgctcctaactccaccatctgtccaaaacctctaggaactaatgataatcccaccactctttgctgactctcttttcgaactcagccctcctgcacccaggtgattaaaaagctttattgatcacacaaagcctgtttggtggtctcttcacatggacacacatgacagaatatacttttcctttcttgtacggtctttgtctttgttatcaagattacagtggaatcacccaataagttgtgaagtattctttctttttatactatctgaaatattgaagttatctgtcttcaatgtttagaagttcctgactgcaaaactctctaaccatgatgttcatatgtatatttttatgactaagtttttgactacagagtcaatgtctgtaatgacagaacttacatttagattttctttttcttgggcaagtcattatcagttgtatatttccaagagcatgtgaattttattcaaattttgagaatcatgaaataaatgtatttatatatttttgtaactctgtagctttgttccctattcccaccctaataacacatattcatgcctctttgttatttcattatgaaccttagatatttgactattttatgagtctattcaaagaatcacatttgggtttacttgatcatccaaatagttttattgttttcattttcagaatatttgatatttgtttcattatttcttgccttatactttacacttgatcattttttagtttcctgatttcaacaattaactcattaattttcagtctttctgtttttctgctatagttacggatataagttttcctgtttttactgcttaatagtttcctcaaatacttaaatgggtatctctatattattcatttctaaatatttaatacccataatattatcttttctaacccattgttggttttaaactgtatatatattttaaagatttccaaatatctagcatgatttttcttttgttgtgaaggaaatcaaagtattttaccccagaatatgtttatttgacacttgatcctagccaaaaggccgagaagtgatgaatatatttatttgaaatattttgaaatagaagcaaacagaagtggccttgcaaagctgtcttttgtggaggaaatgtgcatctgtagataatcttcatgaatgcaactgggatgttcctttccaggcctttccaggatctaggaaagactgagagtttgacatctttacatgtctgaagggaagtatttaccatctattctttttgagggctactacctccgaggctgcagtcacataacaaggccacctttgccagccaagcctccctgctttggtcatgctctgagtctgcattctttctttaacctcaagatggtgtgtaagcttctgtacctggatggggattgggtgtttatccaaagtttcccctgtatacactttaaataaatttgtgtgcttctttccttactgccttggcaagttgatttttcagagacccttcagagggccaaggagaaagcccttccttggtcctcacagttacattgccattcttttactagaaaatattagaggggagggagatttgacacagaaactggtctgtatgacagatactattttgtgttgttgatattttctttgtggcctgatggaaagccaatttgggtaaataatccatgtgtgctcaggaagaatgtacattttcttattattgagtgtgtgtgtgcttatatatacataataaaaaatatgtattataaatataaaatatatttatatttatatgcacacacatatgtatgcacattcaagcaagcataatagttctgtttttcaaatagtcaataatcttgcagccctcagaatcacagcagattcagggacaatgattgctaattgttggttttacatatcatttacttggataagatttcctagtgagagtccattgtttttatcattgcaatattaccagatttatttcctgtatttggatgcaaatttacatggttcttatttattcaggctttaaaaaatctcacaccaacgtggcacatgtatacacatgtaacaaacctgcacgttgtgcacatgtaccctagaacttaaagtataataaaaaaaatataataaaaaaaatcttgtcaacataatatatcttttattcagttgtagaaatgtgcgaccatgaggacaccattacctatgaatgacacgctgagactggaaacccaaaatgatggtaactgagaatggtgttaggactctatgttttcatcacactctcacctaagtgaggaccttaacaaaaagggggaatttttttaaacaaaattatgggaggccattatttttaactaagctcatgcactaggccccagcagaccacaccaaacagaaatggagttgttcttgctaaatgtgacataatcaaacaaagactttaaggaaacacataagacctagcacagatcaggttttgtttttctcctataaacaggatattccagcaaggagataccctctactcagtcctttttcctacttttgcaaaactcactgttctgctgtttcctagtgggtttcaagaacaaataagtacatttacgatggtgatagtgacatcaatgactaatattttggtcattttctcaaaattgagaaaatgaccaaaagaggggaattgttaaagcaaactaaatatggcctgaaaaggactctctacttttatattagagtctttgcagatgaactacaacctgacttaataggcagacaagattgaaaacctaacttaggagtatgcacctgcaacaatagctgagtcttggccaatctcagcagccgtagttcaaccactcatacactgctgagtgttcaaactgtgttcaaataaggcaaataccgtgctgtaaccaatgcagttgtttccgtagctcattgccgatttatgtatgtcacttcccttgttttgtcgataaatatttttccaccacatggctgcactggagtctctctgaatctactgtaatttccgaggactgcccgattagcaaattgttcattgctcaaactactttaaatttaattcagctgaagtttttcttttaaaaatatcttttcctgtaaatttacattcagcttttacttttttaggttttaaaattgtctcttccaagcagcatgtaacaagattttatttgtttttgtataacttgaaaatttatggtcattttaattaacatgtttacttattgatatacatgaatttttttttaccttctgttttttcacttttagtttactgtgctttttctttacttttttattttcattttttattgttctcattttctccctttattcaattacattttattttcccattcattttctattacattagttgtttgctgtacttttgttgttgttactgattattttaataagcctatttgtcctaacagggtcctaacagggtccaaacagggtccaaacttaatcactaatttcaccctcttgttcctggaacatacagtagtgaatgtgaaatacaaatctgtgtagggcttagccctgtggcgcaacttctccgagaggattttgttgtatgcaaaaatgtggctaatgcaaataaatagttgtgtttttttacttttcttgctgctgacagattgttattagcgtacctttttacttaatgtgttctagctatgtgtaagggccttaattcccagacccaaactcttttataattgagattaacacagtctctttccctcacaacacacacacacacacacacacacacacacacacacgcagacacacacacagcaactgcagagtgtactcacaactttacaattcaattcatgattcagtttcattgccatgacttctagatacctccagcatcatactttcttggaactcacatttgtattttaattaattttgtaatattttatgtagtaattttatgcattagtaggaagagtgttttaaggttatctagtatttaacatagatagaactaaaagtgcttagtcactaggattatgtgtattagtgatgttaatctcaatctctatggtgttaaatctgatcaggggctactctgtaatcttttcacatgaactatcaacagcatccaaaggccttgactttcttttgtcccttcctggaacattcctttcttcatttttatgaaaatgctctcttctaattttccttctccaccggtacctttttctcagtatcttttgtcaatgtcacttctttctgtacattcttacccaagttgatattatccattttcatactttaatgtcttctgaatgcagataactaccaaatttacatgttcaacacatttctcttctatgagaccaactcctcctactacttctcacttcatttcataggtccttctacgtgagaacctattgtcaccactcagtttagacctccccttcctagttagtgatattcctatcaatgcacttcattaaatcagagacctggaattcatacatgattccctttccacctcttctgtgttcaggtgataagtatgcctgtatttatccatttgtttcatttgcattgcttctgagatctaagtccatcatttagtcttttgtaattttgaggcaaagttttttgaaaaatgcaacataatctacaaatacattacttatgttatgtcataaaacatagcattatacatagacatgcataggttaaaaaatgacatggaaaattataatcttagtgattagacttatagatgatttctattttctttttgggtttttaaataatcgttatataattataatcaggaaagcaagtgattaaaacaaattcaaaacttttcttgataccagatatgccaaggatcattttccttgataatttaaccaatctcacatatgttctctggctgaattgggctaatgactaggcacatataatgagaaaaaaaatcatttttattttcacatgtgaattgaatatgaaaataggtctaatcataattttcaaaatttgagtttagtagtgaagacaaaaaagtttatttgaaaatcagcattgtgacttatgtgtgattggctacatgtatgtgactaaaacattgggagtcatgaaattgaatgaattacaaggtcagatgcgctttgtatattgctctgtgcttccattatgtcactaagattgcattcccgtctgttagtggtcttatttatttatatttatgcatgctaagtttgaaaggccaatgttgattcttttcgttgcctataatggttttttaatgaggtacattcatttgaattatgagcaatctaatatatattttggaatgtgttgctttaaatgactgctaataattctgtgaaagtttacctcaaaggctaaaatatatgacagttatgttagaattgagtgatattgcaagcactttataagtttattaaaaataaaaaagcttggatactgtgttattgatgacataattcacttaaacgggtgagccagtgtggaagaatgaaacacacaaggactttggcaaaagacaagtctgaattttaatcttaccacatactgtctgtttaatcttaagcagtttactgaacctctctgagctatctatacaacttggaaaaccttactttgcagtattgttgtaagaatcaaataaaattcatacaaaatgcctagcttaatttataccttcctgactactgctgccttataaacctaaatgatgtgatacctgcaggtctgctgctccaaaatcacctacttcattgttagatgagcataatggttggttagtcaacatcgttggctacgttgacacctgactctcctgggggctctattactgctgttcagatgaagattgtattggatatttgagagagggaaaacagagaattacacatataaacacactcagctcagttaatcaagggaaagcccagtgtaatcagggtgaaacttgtgtgtactcaggatcctttctacaaatccttcaccaatctgtagggttatataaccttgtatctgctcataaagataataccaagcatgccctctagagcaacctgtcttggccttgttagcctcatctgtctcatacctgctgcctcccactaaaacagaaaaatcagtccttttctatttcctgaagcaacacctattctttcattggcattgaaatcatttttccttcatgacatttaatgctctgattttcttatttataattgcctttataatcattccctcaaagaactgtgatcccagaaagcagtgtgtctaggcaaaatgatagtgacaatttttatacactttacaagaatctaaataccttaatgattttagaagaaacaaattattccaccccaccctaaattacaagtttcttcaattctttttgtaaagatgacaattgacaaactagattatctacagtgattctaatcattcaggaggtagtaaaatgtcatatttactataatgtgctgggggtagccagggtggaaaggagggagtgggaggggactatatacaaatctaatagcaaagcatgtaaatatttcactaaaatatgctgctcaattaggaaataataatggggtaataagtaaagtgaatgcagttttaactatcttgggcttcttagttgtgatgtaaatggcatgttgcagatagttagcccagagagcagtatcaattcttcttatgacagcttcagcccctctctgaatgatcaagctaaacaagtagatcggcacaaaaaatctgcactggaaacatatgaagcagaatctgaaataattattgatcagggaaatattcatcatagtaatttcaacgtacttcacagcatttgagaatgtaaattattccatttcattatgaaattatacaatccaatcaataatatatagagatttctcatttgctggtaaaaccttaaacataatgagacattttttaaatggaaccagaagaggcatttaaatggcaaatgtcattttcgttattcccctcctacaggattgacttaagtcaatttacatagatcattattgattctagttccacaaaatgggaatgaacaaattatatctgacatattttaaagtccacaaaatgccaatattttttctcccctatataaccttaatctgttcgaatgcaagaatgttttgtttcggtctacattagacacttcaaattaagttacaatcaatattattatataaaaatccagggtaaaaatgtattttcaagcctcaacttaggactggctaataataacaatatgggttatattaatattctaccccaagcaatacataaacaatttatcagagttctttggaaattcctcatagcactgtctagaggtaatcattatttatatttttattatgtattcttccagagctttccctattctgtatttggttttcatacattttgtagaatgtatactactgtgtttattgcttaaatttgtttatagcagtggtgctaaaactcaatatgtatacattgttacaaaataataaacctattaaaaagcctattaaaagagcatatctctttgagctttacacctgctcagctactcattctcatccaacccaaagatactgattctacagaagtaggatggaggctaggaacataaattttaaaaataaaacttaatatagctctggggaaagtagattgtagtattaaaaaacacaggcctataatttcttttttgtgttaatcttatgaggagagtgcatcaagattatcctagtttgtgatgatactttgttaagagattcatctttttcagaatttgaaagaatctcagtgatggaaaatatctgctttatagagctttcagaggaaatcagcattatttggagacttttgaagggcatgaataatttactaacttttcaattccttccacaattatgattgtatccgtgttttctatcttcccttagacaatttttatagctaatgtttttctagaaaattgaccattatattataaaatgtgttgggaatgaagtttttggtgttgcaaaaaaaagaattaacgctggaacaaatgatctctcagcaaggcgagctttactttctgcagaaagggtgctactcaatagctgtccagccacgagagcacgctgaacaaagaagacagttatttatataacgcatatgtatttttgcatctaccctactgctgtgtccggttccggttggctggaataggacctcacatttcacattttacccaattggctattagtttaaaactttcttaattaggtaaggggaatagaacaaagaaaggaaaggaagttgcccaaggatagttaaggaagcatctccaaataaggaatggcatgcactatgggctggggcttgtctagttctgtccaggcatgccagagcaagctaggacagctggtttggaatacataaatgtgtatatatatatatatgtatatacacacacacacacacatactaatagtggataacaatcttatagtaagaaattgtgactttttataatctttgaataggaactttcccatttctcacaaatgtatttgtgtttgtgacatggaggacatattcaattagaacaactccagcttttatctttgtctcttcttcttccttttgtttattgctctctatgcttagcttcttcaatttcatacttaatttttatttgacatttcttttataggttaatatctcctaaacataggcatagtttaactctgttttgatttagatatagtttgatgtctttcaataatgctttttttttcttttttctctttagacctcatttgctatcttttatttttagttttcatatagatttcattgctaacatcaatagaatcatttcttattttattgttaaatctttatttttattatactgtgagaatttggatttttacatacctatatttatgttagtattttggttttgtacctagtaacttagctgaattcttgttaattccagtggtctgctgaggttctcggatttttttttttatgcagacaatgataccatcgaaaaatgattatatctttttttttcaagttttatttttctcattttatactttcttattattgttttatcctggctaaatcctccagtacaatgctagaaaacagaagtgatgaaagccagcaattttatcaggtatcactaatggtaaacttctaaagtctcactattaatattgtatttgttgtaatattttttacaaaaaaataagatggggttttttttgaaatgcctttataaaataagaatcacctattccatgaagtatgaatatatttgatttaaattgacttttaaatcagctagccttggctctttctgatattttgattaccaattcaatgtattctatctctttacttccaacttttctgagtggttttgtattaaatatatctcttttaaagatgatctacctagatttttattttactgtagtgagataggtacttaataactacacatatgttttaatgactgatacatttgcattatatctaccattttatttctttcaccatcctttttcttggtttcatttttagtcttcccttgcttctcttgaactgatacaatttgttttatttattttttatggtaagttggcagcagtatattagctctctcttttggaagctatcctttaaactgtaatacacatacctaactgtaatttattctttagaaatgtttaaaggactcggcatttctatctcttagccagtaaggccttaactttctctttcaagtgtaaaaataaacatattttgatgctcaataatcaatgcattttcctaagatagtttatcaatttttagggccttccattatttcttggaacctatgccttctcttaatgtatatgttttctgtttttattttttatttattttatttttttgggatggagtctcgctctgtcacccaggctggagtgcagtggcacgatctctgctcactgcaacttctgggtcccgggttcaagcaattcttctgcctcagcctcctaagtagctgggacaacaggcgtgtgtgccaccgtgcccggctaattttttgtatttttagcagagatggggtttcaccgtgttagcccagatggtctcttgtactcctgacctcgtgatccgcctgcctcggcctcccaaagtgctgggattacaggcgtaaagtgctgggattacaggcgtgagccaccacggccggctctgtttttaaaaataatttattcattggggtttgttgaattcatttttttagtctttgtatgaagatatcaggaaagcttttgtattaacttataaattagagttaactgacagccaagtgaaagaatctcagctccacgaaaatgacaaaacaaactttagtgtaaaatgacagttgataatctagccccaggatgatcaggcattcttccaattttgcaaacccaggtaatctggagtgctagatagtggcaaaacaaacgaaataaaaacagaaaaactagacagtttgttaactaacaaagagtcaacagttaggcgaattctgtcaataataccagtatcaggactccagcatccactaagtggggatttacagacaggactggtgaaagccatgcagtgtgtcatacacagaagagcctggggaaccaggaaagctatccaaacagttctcagaaacagagatacacgttaaagctcatttatcaaaggagagcataggttagggttgctgtaaaacagtgatgagatgacatatttctaaactgcaattacagaaggtctaggacatcaaaaaagatggtcatttaggcacccaactatggggattaatgaatctaagtaaattagctaggtacagagataagttttggaactaaagacaaatattatccatatgattctgtcaaaggccatttttaatgtaaatgttcatttgtggagcactaagacatccactttgtggtacaactttagaactgcaggaaagcctgttaagagtaaaactgagcattttaggccatttatgttcactgaatgtgctgtgtttgaatttgcagcagtctcctaaagatctagctaaaataccaataatctatttccaagggaaaggccataatttaagaagattttatttctcttttttcacaaaaagaagaaatctaaaagtgtttgaacatgtattatattcctagcatggtataaggtgctttacatatgtgttttgaatgtaattttcaacgggaatctaagagaaagtctaattgcttctagtctgcaaatgaaacccagactgagaatgaccacgtaactttcccaaggcaatataactcatgtctgacaaaacctggaattcttattatttttattcctcacaaagatataaacaaaccacattgacatgtctgagccttaagagttaaatcctctatttgaagagatttatgtcttaaacatgaaaacaatcatatgagccataagtagttttaatattacactatactcttaccttaaataagttaatgtgcatgtagaaaagttactactcactgcatatcaaaataacatgccattatatattttaagcagatgtgtaaagataatatccatctatctaaaattggaacgagacactcatgtcaatatatttttcatgtaaattctacttaaacctgacatgttgatggttagatgtccagatcctatatttactttttaaaaaaccataagtacctctgggacaaaccaattacctccaagagttttcatacagaatattgaccattaatacatgtgtcttcacagttgagaatatttaaggcttttttccccaattaaattaaaaaataacatattctacagtatttgacagtaacattacttctaaatttcaaatcgtagtaaaagatgtggttttgtataaaaaggattactttgcattaatattcttttaaacttcaaagacatgcgatctcttcaaaacagcacacgatttaggttttaaaaattctttttaatcttccatagttctgctaatcaatatctgtaaacttagcatagtgcaagaaaactcagtgtttaaaaagatgcatgaaaattcataatgttgatggtattctgaagttgtgtccatatcttcaactaaaacgaaatcattaaaatttagatttaatgtatgaatacaagctaccacggtgtatacatatactttgaaggcactgcttaaaacattctctttaggaaataattctactctgttttcactttctttttcttttttttcaaaatttagtaaaaatttaagtaattctcttatttgctgacaaaaatatattagaatattgaaggatttcttatttcttgaggaatgaaaatattgggggccagtattttcatagtgggacctcatttctccaaaataaagaaaattaagttggcttggtggcaggcacctgcggtcccagctaattgtgaggctgaagtgggaggatggcttgagcccaggaggtcgaggatgcagtgagctgtgattgtgccactacattccagcctggttgactcagcaaaactgtctcaaaacaaaaaaaaaaaatcaaagaaaatattggtggtatgttcattcacaaattatttcagtaatccaacaatcacattacacattaagtactataaatttaatgatatttcattaggtgtgtgaatggttaaaaatatcatagatatgatctatctttgcaagtaagaaaattccattattttcaatttgtcataaataaattaccatgtttaaaggattctaagaccccatcaactgcaaagtggatgtcttttgcaggatgctaaaatgggaaaacctgaacaccttggaaatgatgtaatgtggtatgatattgttaataatttgtagactgttagaagatctaaaaccaaaactcacctaggtttttggtatcctcttattttacttaatgatatactacaacagaccaggcacaatggctcatgcctgtaatcccagcactttgggaggccgaggtgggcagatacttgaggtcaggagtttgagaccagcctggccaacatggtgaaaccccgtctctactaaaaatacaaaaattagctgggtgtggtggtgcacgactgtaatcccagctactcaggagaaggaggcacgggaagagaatggcttgaaccagggaggcaaatgttgcagtgtgcaaagatcacgccactgcactccagcctgggtggcaaagcaagactctacttcaaacacaaaaacaaaacaaaacaaaaccacattatactaccagacttttcctagaccaaagaaaagtctttgaaaatataatattaatgactccatgttaatctatgatatgagtatgacatagattattaataagatttctggctgagcatggtggctcacccctgtaatcccagcactttgagaggacaaggcgagtggatcaccttaggtcagaagttcaaaaccagactggccaatatggtgaaaccccttctctactaaaaacacaaaagttagctggttgtggtggtgcacacctgtagttccagctacttgggaggctgaggaaggagaattgcttgaacccgggaggcagaggttgcagtgagctgagatcacgccactgcactccagcctaggtgacgaagcaagactccatctcaaaaaaaaaaaaaaaaaaaaaaggccaggtgctgtggctcacgtctataatcccagcactttgggaggccgaggcaggtcaggagtttgagaccagcatggccaacatggtgaaaccccatctctactgaaaataaaaaattagctgggtgtggtggcccacacctgtagtcccagctacttgggaggctgagggaggagaatcacttgaacctgggaagcagaggttgcaatgagctgagatcacgccactgcactctagcctgggtgacagaatgagactccatctcaaaaacaaaaaaaagaaaattaaaaaaagatttttggtcactgttttctttctctattaaatattgtcttcttgaacatcattttcaccactgaatattttcttagaatgaattacattttttgcttattaattttaggttaataataatatcataacataatactctgacacatatatttttactctgaaacatttttgttggcataaattacataaaatacttttatgattttttttctttagagaaggtattagataaggctgaagtgcatttcgataaaacctgagctattttatctacagagttcttgggtcacatttatttttcctctgtgaatgttactcagttttcttctgatattaatcctttagatttcccaggccagtcccatttctcttccttttatttacacagtggacaattctgggcattcctagagtgctagaagtttgcaaacagaacagcagcaatgatggctgggtcatcacccacatggatctttttggcccatagagtctaaaattttagacagctacatttttcagcctatgtgtttggagaaatagtatttccttcccttttattcttaagttttatattaaattctgaatggcaaggagatttcatctaatcttccaaattggatagattgctaatggctgcctctgggactgtgtagaagaatataaaattgacttttagttctttgggaaacagttccatgatcagtcacagtaatatctctcatgcccgctgagtatttccaagtgtaagttaaggagagatctcctcctcagtagttttcctgaatgtgggtgatccatttcaactttcaggttctttttttcttcaagtcagccctgctattattcctttcatgatcaattctttacattggtgttctttcctttggaaatacagagtttaaatacatcaaatgtctataatgttcctactatttcatttttttcctatttttatctctatcccctgcttatgagttttgggaaatatttccaaattatcttctatattcaatgagttttcttctcattgtagccatccactgcgatgacttctgttttgttagcttgtttgttaattaaatactttgtgtattagtcagcaatggccgaaaatgcatggtcctctcaaatttggcatgtttaggaacatttaaagagggactatatacatagatatgggctgtttataaggatgctacaaaggagagttgatcactctagaactactgataccagaatgctgttcccaccccaagcttgaaatgaagcattagttcccaaaaccttgtgaaagggacagccacgtggagtggcccacctgatattaactaatagttaggagcagcagaaagcccttatcaaccccacagggagacagtcagagaataattcatacaaaagtcatttagaatacaaatatagtcttctctatttaccaaggtagtacaaaaaaatttaaaaggcaaagaaaacaggctaacagtatgaaataactttatattagcaagtaataaataacaacacggaatggtagaattgagaccaaacatattaaccatcttagtaaatccaaatggatttaccttgcttactaagagaagattgtcagattggagtatacaaatcaaaaaccaattctttgctgtgtatatgaggcacaactaaaattaaagtgattcagaatggctaaaaataaaaggatacaaaagcataccaggaaaatgcaataaaaagaaagtaaggtaaagtttctgatatcaagcaaggtagactttagtccaatacgcattaaataatacaaagaaggtaggattgccagatttagcaaataaaagtattgaaatctcagttaaatttgaatttcaggcaaccagggaatattttaacgtattaatacccaagcatcatttgcttcaatatacaaaaattagtgactttagataaaattgaaatttaactgggattcatttttttaatgtgaccaccctattcctttcccactaaataacaattatcctgagcaagcaaaatctatggaacgtaatcgtaaaacaactttatttttgtctcactggccctgtaaagctgctgttttctaccaggtgttactccttgtcaataacatttctaacttctccagggttgcagcatggggaggaaggatttgtaaggagagaagaaagttctgacttgattcacagtgttgtggttattcagaataccaatcttcttcaatatgttcaaaactcaccatttcctttgacatttattttatggtttctttggagaccctcttgccatctctggggatgtctgccttacagtgttgttacaggtgaagacacctcactttttgctggatgtaccctttcctagctttgtagaaatacagcactaactttgggttatctttgctgattttgccttgttgctctaggtgaccattttggataggaccccatataaccttgcatgcaaggctgatgtgtgttcacaggaagcactgatacattctttgctcctattaattttggaaggctagcccctgctaccgcctctctttccccaaccatcaaaataactccttagctcatttccagtcctttggattttctagggagaaacatacattatcttctctgtcttatgttgtaagggacacatattatgctctctgaggccataagcttctaattctttagacttcttctcttgtattttgcctattaaaatatatttaaaacatatgtaacatttaaaaaaacctgtacaaaacacttcaaataaaatatatattttagtaaattagaaggaatgaaatgatacaacctcaaattacaaactcgaagatgtatacttaataggttgcaacatggttttataatgtgactcaatatttccaatcttttgaaagacagacatacaaaagatcaaagcatccattacaaagtctcagctttcaagtatttttttgttgggagtaaaaatgaggtaaagtgttatgggctattttataaatattattttattatgaatattatatatattatagcaatataaaaatacaaggagtatacaaatatatatacatacatatatttcttgtagttttatattgctataagaaacataatattcataatttattcataataaaatatatacatacatatgtgaaaaatatagataagcaaagcaggaaaacaaaaatacacataccctcaccagagataacattttagcttatatatttctattatttttctacatacaattgtgtataggtttttatacaaaggtatacatatagtatacgtattatggcctgcacttttttcactaaattatatagcatatttcccattccattaaatattctttttcatcatattactattgcaatatatagcatcctaaaatgtatttgctcattcccctttgtggggacatattacaaataatcctgtaacatgtatcttttatgtaaattaatcatgcagttcatcttgtggtataatcgtgtccaatgcttagaagtttaaaaacttctgacacatattgccaaatggtcttccataaggattatgcataattgcagtactcatcagcaatttattttttgctacactaccaccaatgtttgatatgcctataaaataaaaataaatattcctcatttaattttcttaataactgactctgtctaaacacttttaaaactgttttcaatggcactggtctaaaaaatagaacttatgtttgcttataagagtttgggaagtgcccagtataacaaagtgtttttttactactaggtttgtcagagcttttaacaggcttaacatgctaaaatagatcatgactcatcaaaggaggtctattgcatctccattcctagtagccactgaactcctttatcttgaaaccacaatcaacacataggtgaaagccttaaaaaaacacacaaaatgctgctatgtttaattattagtaaatatcagatttcagattctcaacaggcttctttctgataacggtgttttctgtattactttgtgattttctcaaaattcaagttgagaaaccttatttttgggatgaaagtttcctgtcaagatattcatcattgatcattgttcaaactctctttccattagctttgtttttcatttttatttttgtttctttattattttttttaacaattgcctggattcttagagtagctggagatcagtctggttgtggaggaaataggggaagaaaacctaggttttgctaatttatatgttatttgtatgtttggtttttgactggctatatcatcatccatgtttggctttagtaaatatcagtttggctctaaagcatttcttgagaatattcccagaaactttattgttaggtaattgcaaaccaaactataagaaaaacataggtttgctttttaaaataccttttccatctttcaaatctgcagtttttcctcactgatgaaactaaaggacctgggcattattcaaaaagcaatttgctattatctaaaatattattagaggaaattgagtagtcatttggacactcccaggatttcaatctggttataaaattaagatacacacttaatgatgttgtgtttggaattctttttaagttgcacatcataaaaagtatgcaaaataaaagtttaaaaattctaaagttctgctctttaacagattgttgaacttacaagtttgaccaaactaggtatgaaactcaagtaccactcacttcttgaaataatgatacttcttcatactccacctagaaacagggcaagacagatagaaaccatgctggatgaatacaaaaaggtatcagcatccttttaagtaaaaaagtacagaaaaactactgttaaattaagaacctccaatgtcaacaatgaggaaatatttttggaaggtaagaaaacaaattgggaaaagtctgctttggctaattagttttatggaaagaagctacattcttttttcagaaaagccatgaaactttctgcatttctgtgaatcttagtaagcatcagatgcatgcttaggaaataatttacaactcaattgcatgagtcaatgttcattcagtccagttagccccattttgttctttgttttttcgtaagtgttacatattttttgtttctctctgttctctgttaagtatatattttctagtataccatttttattccttgttctttactataatttttgaattatgttcttagtagttattctgggagttagaattaacattattttataataatctagttcagttaagtataaatttattttccatagtatgcacactcttttctatgacttcgtctgctttatgttattgtcaaaccaattgcatctttatatattaactcaccacaactgtttcattttttatttatttttatctttaattctttaaattgacagataaaatgatatgtatttacaatgtaaaacatgatgttttgaggaaaatatactttgcaaaatgactcaccctaggtaattaacatatgcattacatcacatagttatcatttttgtggtgagaactctacatccacactcagcatttttcaagaatacaacatattattaaccacagtcaccatatagtacaatagagctcttgaagttattactcctatctaactgaaattttgtattctttgaccaatatccccctaaacctctctctgttaaccaccattctaccctctacttctgtgaattcaacatttttagattccacgtataagtgagataacacagtatttgtctttctgttcctggcttatttcacttaacattgtgtctttcaggtttaaccatgttgtcacaaatgatattatttccttctgttttaaggctgaatattattttattgcataaattaggttggtgcaaaagttctctggtcatggcaaaaaccaaaattgcttttgcaccaactgaatataaactccgttttttaaatcctttcactgatggatagacatttaggttgattccatgttttggctatcatgaaaatgctacaatgaacatggggatgcagataatatgtctttggtacactaatttcattgtttcaaatatatactaattagtggaattcctggattatgattactgttttacgctattgtcttttaaattagttagtacagagatttcaagtttggaagttaaccggaaccatttttctaagggtaaatgtttcagcacgggccataatagcaggcaatctagcacattgcctccattaaagaagccttgcccaaaggcaaccattatagtctttctggagacccattttttcggggagccaagcaggtcacacaagtctaggaaatcaaagggaaatcacaggcagagaactacagctggctgggtgagcgtgacgagccccaaaagctcagtttctctggtgccatggcttggagggtcacacctacaaccatgggcggcacatttaacaggatgctgcaacccaggaaccaaggagggaaaacaatccggggacactcctactgtcttcttctccaccctgggtcacatactgaaaggaaggcaactaaaaggatgcttttattctcacttctttttctagatgaataacagattgtcttcagcttgcacccctctggagtgcactctgaaacactggaacttctttaacctcaggagtttgaagataaaagtgactcattttcttttacacaagggtatggaatttttactaaacctttgcaagcattgtaagaccagctcttttatcaatcatatcaggaaggcccaaagataataattcctccaaattacaaaagcaacctccatgggaaccatctgcagctccttatttggggcctcttcaagctcctttctcgtttcaggaccttaggcaaataaaaggaaacttaggccaattttctgacaaccctgatagatatatagaagctttccagaatttaactcaggtgtttcacctcatgtggaagtatgttatgctgctcctgaactaaatcctaagagcaactgaaaaacagaaagatctgcaggcagcagacaactctggagatgagcaacatatgttctataatacaccaaaagcaaggaaatgtgacggggaattgcagaaacaccattcccaattgaaagagaagcagttgctcttgacaaccctaattgggaccccagtagctctgcagatgaatggaaaagaaagcacgttttaatatgcgttttagaggggctacaaagaactaaggccagacctctcaattctaaattgagttggtctaattgtaaatttggtttgtctatgataaaccaaaagccagagaagaatcctgtagcctttgtggaaaggctgagggaggcactgatagagtacacctccttaacccctgactcagttgaggggctgcttattctaaaagacaagtttattacacaggcagcttctgatattagaaggaaactatagaagcaagctataggaccagatagtaccttagagagcctcctgagggtggccacttcaatcttttataatagggaccaggaggaggcccaaaagagggaatgctcaggagaagaacaaaggctatagcagctgctttgcaggcttgcaaattccaggatccactaggtgcatccgctagttgctatccgtgtgacaagccagggcattttaagaaggaatgcccaaacagcaagaggaagccacctcaaccctgtccagcctatggtggaggccaccggaaatcaaactgcccccagagacaaagttcactgtgtttagaaccagtctcacagagggtctgatgggtcctggggctcaaacactggctccagagtagcaaactgccattatagcgcaagagccctgggtgattatggaaattaaaggaaggaaagtaaactaccttctaaacactagagccagtctccctcttttctcttgtctaatccagggctccccttttcccacagcacaaccttgtaaggggtatctcaggaaaaactctaatccaatatttttctaaacctcttagttgcagttaggaggacctattgtttccaaaccacttccacaatagattcactggtcagaaaagcctccaaattaactttaactctttacaccccacataatatggcaagattactgccttctagggggagctcttagctaacaaacagccagtaaagcaagaaatacataaggtaggataaacagtagttactctaaataacatctctccccacacacaagtgctcaattagctgaactaatagctcttacaagagcaccgaaattaagcaagggaaaggtagctaacacttatactaactggaagtatgctttcttagctttccatgctcatgctgccatttagaaggaaagacattttcttatcactaatgaatcgcctataaaatatcatcagggaattaacaggttattatcttcagtttttcttccatgagaaataccagggattcattgtaaggaacatcaaaaggaaacaaagtaaccaaaggaaataggttagctaatcaggcagctaagtcaaaggcaaggaagcctcaaggcattaacacacttcaagccccttctaatctaggaaagctccataagagaaatttaatctcagtattcccctgcagaaatagaataggccacttcttgagggcgttctttccagcctcacgatggcttcagtcaggatggcaaactccatttgtcagcccctaggcaacggaaagtccttaaaatccttcaccaaccttttcactttggaaaggataaaacttagcaaaatgttcagagattgttttcaggcagaaaacccctagtcggttaagcatgtaacctcactagctctcttccaacaggaattgacgcaactagcagaaatccaaccccaggaaataggatcacctctatttaactcaggacatttggttttagtgtaagctcatctctctctttccttccttacaccggtgggaagggccccacactgttcttctttcaacaccctcagcagtaaaagttacaggtatcaactcctgaatacatcacactcaagtcaaagcccaaacagctgagggagcaacccctggcagcccagaggaatgtcctgaatatcaacacgaagaaatagattttaagctgaaaatcataaaagataagtaactgagtgagggctactcatcttagtcccactcctacctcaccagatactttttatcatttctacgttttcctcaggaattcactgccaaatattataacttctttttaatgcatatttgcagggagattttaattattcatagaattgcatttgtacttttgtagatcccccaaagggaaatgttatatcttggcaagtaaagtttttaacggaaattatttactacatctcttgtgggaattgttatagtcatactactatttacaatagaactatacactgtgacacctacaatgtggatttctggctataaaattctaattgctgtaatattttgcctaatcatcatccttataacagaattaataactacaggaaaaatttagtcaaggttgttttgcttatagcattggtaatagttacagataagaagtaagcatgaaagttttactatcattaagtttgataggactttttattaaagattggtaatatggctcactctaagctatggaaagaaggttataaagaaagtgattttatataaggaaggatcttgtatggcaaatttttgtcctagaaggaaatgactggttgtttaaaggaaggatatttagaacaagttagaaaatttgcgtatgttgtacgaaggtcagtgaaaaataatgaaataatttaataattaaaggaaaggaattggcaagattaacactaaagttctattagccacccaatgacatatttctcccaatcatattgcaagttataaaaatcgcctaaacctaaaattaagggggaaatgtatgtttttctcaaggaaaatgttgtttatattaacctttctggcaatgtacagcgatatctaggggaggcaaactggtattacaatccgctgggataactaacaggtatcaaactctactgtcatagttatggtctataggacccccactaacagtggtaatcttttttttttttttttttttttttttttttttttttgagagagagtctcgctctgtagcccaggctgcagtgcagtggcgcgatctctgctcactgcaacctccgcctcccgggttcacgccattctcctgcctcagccacccgagtagctgggaccacaggcgcccgccaccacgcccagctaattttttgtatttttagtagagacagggtttcaccgtgttagccaggatggtctcgatctcttgacctcgtgatccgcccgtctctgcctcgcaaagtgctggcattacaggcatgagccaccgcgcccggcctaccagtggtaatcttaatgctcatattctaaccctatctttcaaacctccttgtaaaatttatctcttttcacgtagacgcaatcaaactacaaatggcactgcaaaccatgcatgtacacgcaattcttcccagaatgctttatcaacttcaagaggaggcccaactgttgtccccaccacacgatgcctcttttcaacaggaagtagccagaaagaatcatcatccaacacccgcctaacagcagttaggtttatgtctcctgaggggggaaataatacaggaattattaagaaattattttaggcagctagaaagggtgaaagttctcggtggaatttttcttttaataagaagcaaaccccaaacccatttttttctctaacagaaagtaacctgagaagctaagcatagatgtaacttcgtgtgaaaatcagtcttaatccttttaagtatcttatttatacatgaaattcactttctgaaattttagaaagttaaaatagattttcttgcttttctagtctagcactaactctttctggttctgtgattagtttagaaatattaccttgaaattctgtaatctggtattattctctttctcttatctgtatattctttgttttatgagtttcctatatttgttttctaatatgtctgcatcttgctaatttatactgctcccaacaacttcttcccaatgaataggatatctttctacttagttttgaaaccccaaagggcccagactcctccagatccttcagattttattctggaccagttgcattgacccatgcattaaagtatgtaaaaactgctacctaggtttacatgctcttctgaattgtctcactgttcttcccatgaacttctgtttgctctctgggggattctcatcttcttgcattcctcaaatgccccattgattccctgagatcacatgagcacaagctgtcagtgctttcttccaattcacttacagtttctagtttgggggataaattgtcacttgaatggtctgttttaagatgcggtctataagttttaggttttattattagggataatctgtctttcttatggagaagatttggaaatattccaaaatattctacaatcatcatcacttttacaagatgtacttggcatattgattttttaatgaactctgttcctcttaatgctttttagatattgttcccatattgtccagttttcagagttatgtatggagagcctgatgtcattttccctctgtcttaaacagttttgtttgtttgttcctttgtttctgcctgtaaaatttagaatttttatttttgccttaaagtaaaaatctcacttaacttttctctaaatgtacttagtctcttttaattcatagtggctactattcattgaatcttttgtccccccactcctctcaggtaaaattaagttccatgtatttaagaagaacctaatagaatagaaaatagcaagacaatatccaatagaacttacgttagctcccaatactgcacagacataaaacatgtgtacgaatgacaaaaatgtaaatcattggaatgtcttagcatctttcttttatcattctgcataaatcttgtggtcatcaattattattctttattgcttctgtttttatctgctctcttctctaattgtgcaattcattttatacatatactgcatcacctggctctttcagtttcttatctcttccttcatcttcattttcatttaaacctataaaaatatcttgatctgctcttctaatgcagtgtttattattgtattttgcagcaaccaatgtgttacttattctcttcatcacattttttattcagtaataatctttcttatttaatatggtttacagattggtttatctaactcttattgcatttatgatggattatttttttatatttttaactttcctctttcttattatatgtctctttcaaatggggccatttgctctgaatactttcctgccctttctttactgaacttaacaaatccctgttattcctggtctgattgtttatttgtaaaagttagtttatttgggaactaagatgggttgactcaaatactatatagttacctgttcaaagtattaaattctgtacaaaagaaaactagaagttttcttaattttgccagttcagaaggttcacttacatgaaacaaatacaaagtaagctgaaatattgtagggtaaagtatttcactatcaaggctaaagatttttcctctcagcttttatcattgttctatttgtgtggctatgattaactgggacatgacaccaccttccctaattgtcagaactgccctcatttggaacttgctgtagctccatttcaataaagtattttctaatccaggcatagactgagcatgaccacacagcatctgatgcacttccttgtcatcacacataggattgtacttagctccagcaattgcctcatgacctcccaacccatagttcttgttacatttgaaagcctgtggtagcctcagctggagaacaagccagggacctaactgagtaaaatactaattacctaaagaagcagctaatactggaagattcgatgctaggtagaatatctttattatgagcttttgtgtggcagtcaaatttaacaagggctagatttccttctgcagctggctaactatcctttaaggcaataccttgccctttacttaatacactggttcagacaactcctaaatgaaaatcagcatgtgccacagtccaatgaatctcctgtaataatctgtaaatttaagacttattaggtactggtacaccataatttttaaaagctcagattataaaccctagctatatggtagattccagaagcattttgttttttgttttgattttgtttgtttgtttttgtttttcaaagctgatgttcagcttcatgccagactaattaaaaaaaaaatctatgggattgttatatttaaaatctccccccaggtgattttaacctgtaaccaaggctaggaatcactgttaagagcctacatttgtatccttacttctccattgacaagctgtgtaaccaatcagtatatttgggattctctatagaaagggatagtaagagcacataattcatgttgagaatgatagacaagttaatatacctagagtagtctgtgtgtgggaaattagggctacagtatatcgaaggctagttatatttcccttgagaagcatctattttactaaaataagttattaattttttaatttaatagctataatgtattgttattaatcttaatgacttccttacctttcatggaaaaagttgctttcagattattaaaatatgtcccttttatagtgactgtcttaaaacatagtctgtgtgggattttgggatggggcaaatgatccaaaaattacataagtaaataaagtatgattcttatactcaagaattttagagtctacttgagaaataagaaaaaaaaaacacaatccaacataatgtattgtgatgatcacaaagataaagggaaatgcagaacaaagtacaaccaaatcatattctgtgtttgtgtattgcaggatggttgagaaggaaataaggtatgtgtacgacatcaacgaagtctcagaataaagagcataatatggagaacactgcaggaaaaaaagacatgaaatccaggtataactcagaaactttctagttacataatcctggccaggcgaatccctcaattactttcctcacatttaaaactggacatataaaaattggcatgcatagcttttcaagtatattgtgtgaaacacatcatgtgtgtaaaaagtagattggaaattataaagttctatataaatatcatatactaccaatgttacctgtaactttatattttctttaaatattgtggtagaaaatatgttcatataataaaatatagaaaacatgaaaaaaaacttggcaatcaaatataacagggagggtgcattttatttcaataaagggtaatcaccaaattaagacatgtaattggttccaattttcaaaatgcagtcaaattctcttattttggtaattgatcagattatgtttatgatcatatcccacatattttctaaaaggaaaaagttactgcttttccagtctccaggaagaaaggggaccagagcaggattattactgtttgttctctctgttctgctcatctgatcttcttatggaggaactctgaacaactgacacaagtgatggacaaactgaaaagatgaaacaaagatactctctgagttttctcataatttatctttttttttttaacctcacatgccaccaagtctctacaacagccttaggctggaaaaagtatgcgaatttgcattgcactatgccttgcgcttcagaatcataattttgcctgattatcattgcatccataattataaatcataagcaaaacaccagcttacagtagttacttcaggcataattgctgtggtaagcaataacatcagtaatcagtggttgacaacaaccaatgtttctttctcttttttcaaaagctgtattttcattttgaagccaggctaagtagctccaatctgtgactgttattctcatgccagtggtcaagaatgggaaagagcctaacctaacgaaataagcatccttaagcttccacttggtcatggaaagcattatatgatcttatatcccattgagcaaagcatgtcttatagccaagtccaaagtcaatgaagctggtatgtatactccacctaaattatatgtgtgcaagtcacatgattgtggacagcaaggcataattctagtacagggagggggtgaataatggaggaaaatattccaattcattcctggccaggtggcatttgctgcagatgttatatttaaaatcttattaggtatgagagccgcctgaataaaagtaaacaggacaacacctgggaattaaatttttaaacattatttttatctattaattaacaaataaacattgtctatatttattgtgttctacatgtaagttttaaacatatgcatttttaaatagctaaattgaggtaattaacacacttttctttacatactttctttttgtgtggtgagaacaccaaaaatctactctcttagcaattttaaagaatacaaaacattgttattaactatagttgctgtagtgttcaatagatctttggaaattatttctactattaaactgaaattttgtgtcctttgaccaacatatcctcaatgccttactctcaccgctcagtcataagcaaccaccatttaactctctacttctctgtgctcaactttttagatcacgcattatttgtctttctgtgcctggcttacttcacttaacataatgttctcctggttcatccatgttgttacaaatgacagaatttccttctgttttagggctgaatagtattccattgtgtatacataacacatttgctttatccattcatcattgatggatacttagatcgattccatatcttagctattgtgaatgatgctgcaatgaacacgagtgtacagatatctctttgacatggtgatttcagttcttttggatatatacccaatagtgggatttctttatcatatagtagttcaatttttaatattctgaggaatctccacactgtttttcacaatggttgtactaatttaccctcccaccaacagtgtgcaagggttccattttctccatatcctcttcaacactcgttattttttgtctttttgataatagccattctaacagatgtgaggtgatattttattgtggttttttatttctctgatgattaaacttattgaactttttttcatatatctgtgggccatttatatccctgggatcatcagaattttaaactttatttttacagattcaaatttataaaaataatgggattttattgtgaatttttactttgcgaaattaatattaggagagatttcatattatttgaaatgaagtggtctattgtaatgcatattagtgactttagctgcgtcaccactggtcccaggaagataaaccaaacagctacgtatgctgttgggggaacacttgaatgaaggcaggaataagattccttgagtccagtattacctccgtccttggtgaagttagccaattcctggttgatcttggcttagctgttgatcagcaaatttgatgggttaagaaacaaaaatgaaaaaaacagtggagggtagaaagaagatgcacttacttgcatctgtatcacatttttagtatggaatggggatttttgctccactcctctggaggaatgacattgaaaaattagaaaatgtggctttacgaaatgtcttgttttcttttgacctctcctgtgttttgtttcctggcttaaggagaggtaggatttcaagcattttcttccctttcatgtggtaaatagacatggaggcttttttgccaagatgcaagggaggcctgaaatgtagtttctgtccttctccttgctatgttaaatgttccttcttcagagaagcgcattatctgtttcacttcttcacatgataccatctctaactttctcttggattatcaagctgaaaaacaggctatggctcttaggcaatgggctaatgaaagtgcccagactttggcctacagatccagaggcctcctccaaggtctagagcagagctttccaacaaaaacataatatgagctgcatatgtaattttaaaaattctagtagccacgttaaaaaagtaaaaaaagcaggtaaagttaaattaataatatattttgttcagcatggtattttcaaacattatcatttcagcatgtaatcaatataaaaatggtcaaaagagtttttcttttttgtattaaatttttaaaaactgatgttcattttatacttagagcatatctcaattcagactaaccacatttcacaggcccaggagttacatgttagtagtgggtatctactgagcagtgcagatctggagctttgttttagtttccattacagtttgaaaagggttgcaaattcttggatcgcttccttaacccaagcagtcctgaagtgcatatttcaaaatagcataccagaagaactttattctgctatttatgaaagggtagcttatactctatttgatcctcatctgcttatttgtacctactctcacgtagttcagcacatcagttattaaaattgagttgcctgacttattttttttttttacctggatgagaaacattctaccctaaaaaggccagtggatccataggttaacatgatttttaacttccaggcttgcaaattgtaatgattcacaagtagacaagttaatttctcataggtaaagctaatgacatttttagggacataaaaattttgaaacaatttattaattatttttaatttttgtgggtacatagtagatgtacatattgatagagtacatgagatgttttaatacaggcacgcaatgtaaaataagaaaatggtgtacctattccctccagcatttatcctttgagttatttcaaaatgtacaattattattgactattagtcaccctgttttgctatcaaatagtaggtcttattcatcctttctaactatttttttttgtacccattaacaattctcacctcctcaccagtccctaaatacctttcccagcctctggtaaccatcctactttctgtgtacatgagttcaattgttttgattttcagatctcacattgtgacataagtgagaacatgtgatatttgcctttctgtgcctggtttatttcatttaacgtaataacctccagttctgtccatggtactgcaaataactggatctcattttttttatggctaaatagcaatccattttgtgtatgtaccacattttccttatcctttcatctgtttatggatacttagtttatttccacatcttagctgttgtaaacagtgctgcaataaacataggagtgatgttatttctttgatctattgatttcctttctttttgttgtatacctagcagtgggattgtcggatcacatggtaattcagtttttagtttctttttcttttctttctttctttctttcttttttttttttttctgggatggagtcttactctcttgcccaggctggagtgcaatggcatgatctcagctcactgcaacctctgcctcccagattcaagtgattcttctgcctcagcctcctgagtagctgggattacaggcacctgccatcatgctcggctaatttttgtactttcgtggagaaggggtttcaccatgttggccaggctggtcttaaactcctgacctcaggtgatctgcctgcctctgcttcccaaagtgctgggattacagttgtgagccactgcgcctggcccagtttttagtttcttaaggaaccttcaaaccgttatccacagtggttgtactaatttacattcctaccaacattgtacaagggttcccttttctccacatccttgccattattgttattacctgtcttttggatataagccattttgactgtggtgagatgacatcttattttagttttgacttgcattactctggcgagcaatgatgttgagcaccttttaacttgtatgtcttcttttgagaaatgtctatttgccacttgtatgtcctcttttgagaaatgtctattcagatcatttgtccatttttaaattggtttgttagatttgtttcctatagggttgtctgagctccttatatattatggttattaatctttttccagacaggcagtttgggaatacttttctccattctgtgggttgtctcttcactttgttgattgtttcctttgctgcatagaagccttttaacttgatgtgatcccatttgtccacttttggtttggttgctgtgcttgtgaggtattgctcaaaaaattctttcccagatcaatgtcctggagattttcatcaatgttttattgtaggagtttcatagtttgaggtcttaggtaactaagtctttaatgcattttgagttgatttttgtgtatggtcagagatgggggtctagttttattcttttgcatatgaatatccagtttccccagcaccgtttattagagagactatcttttccctagtgtatgttcttggcacctttttaaaaaatgagttcaccgtaggtgtgtagatctgggttctctattttgtttcattggtctttgtgtctgtttttaggccagtgccatgctgtttttgttactatatcgctgtagtataatttaaagtcaggttttatgattcttccagttttgttctttttgcctaggataggttcagctattctagccttttgtggttttgtataaatattagaattttttttctatttctgtaaagactgttattggtattttgataggaattacattaaatatatcgattgctttgggtagtatggacatttttttttttttttgagatggagtctcactctgtcacccaggttggagtgcaatggcacgatcttgactcactacaacttctgcctcccgtgttcaagtgattctcccacctcagcctcctgagtagctggggttacaggcacctgacatcatgcttggctaatttttgtatttttgtagagatggggttttctcatgttggccaggctggtcttgaactgctgacctcaggtgatccacctgcctcggcctcccaaagtactgagattacaggcatgagccaccgcacccagcccagtagagacatattaacaatgttgattcttccaatctttgaacataaaatatttattttatttcttaatgtcgtcttcaatttttttcattagtgttttatagttttcatggtagagatctttcacttctttggttaggttaattcctaggtatttaattttatttgtggctattgtaaacagaattactttctttttctttttcagattgatcactgttggcatatagaaatgctactgatttttgtaagttgattttgtattctgcaactttactgaatttgtttatcagttctaatagttttcttgtggagtctaggtttttctaaatatcagattatatcatctgcaaacaaggataatttgacttctttcattcccatttgaatttcctttatttctttctcttgtctgattgctctagtaggacttctagtgctatgttgaataacagtggtgaaagtgagaatccttgtcatattccaaatcttagataaaaggcttttagtttttccccattcagcatgatagtagatttgggtctctcgtaaatggcttttgttgtgttgaggtacgttccttctatacccagttttttgagagtttttataatgaagggatgctgaggtttatcaaatgctttttcagcatcgactgaaatgatcatattgtgtttgtccttcactctgttgatatgacgtcttacactgattgatttgcaaatgtcagatcatccttgtatcctagggctgaatcccacttggtcatgatgaatgatttttctaatttattcttgaattcagtttgctagtctttcgctgataattttttgtgtcagtattcatcagagatattggcctgtagtattcttcttttgatgtgtctttgtctagtgttggtatcagagtaatactggctttgtagaattagtttagaagtattccctactcctctatttttcaaaatatttttaggagccttggtaatatgtcttatttaaaggtttggtagaattcagcagagaagccattgggttctgggcttttctttagtgagaggctttttattatggcttcaaccttgctacttgttattggtctcttcaggttttagatttcttcttggttcaattttgttgagttgtatgtgtcaagaaatttgtccattttttctagaatttccaatttgttggcctatagttattcatagtatccactaatgatcctttgaacttttacagtatcagttgtagtgtcttgttttttatttctcatctaatttatttggatcttcatttgtgtcttagtctggctaaaagtttgtcaattttgtttaaattttcaaaaaaataactgttttattgatcttttttattttttcattttgatttaatttatttttgctctgattttcattactttttgtttctcattttaagtttggtttgctcttgtttttctctaaggtccattattaggttgcttatttggagtttttcctcttttttgatgcaggcatttataattataaatttccctgtgagtactgctttcactgtattccatatgatttgacatgctgtgtttctattatcatttgtttcgagaaatttttcaatttcctttttaatttctgttttgacgcaccagtcattcaggagcatatggtttaatttccatgtatttggatagtttctaaaattcctcttgttactaaattctagttatattccattgtggtcagagaagatgcttgatattatgtcaatttttttaaatgttttaagacttgtttcttgacctaacatatatatggtctattcttgagagtgatccatgtgctgaggaaaagaatgtgtattatttagccattgaatgaaatgttatgtaaatatatattagatacatttggtccattgtgcagattaagcccaatgtttctttgttgattttctgcctggaagatctgtccaatgctgaaaatggaatgttgaagtcttcagctatcatggtgttggggccgacctctacctttagctctaataatatttgctttatacatctgggttctccagtgttgggtgcatatatttttaaaattgttatattctcttgctgaattgatccctgtatcattttatggtgctctgctcagtctcttatagtttttgctttgaaatttatttagtctgatataagtatagctactcttgctttttcctttccattggcatggaatatctttttccatccctttattttccatctatgtgtgtctttataggtgaagtgcatttttttgtgggcaacagatccatggggtcttgtttcttcatccattcagccactctatgtctttttattgaagagttcagtctatttatattcagtattattattgataagtaaagatttactcttgccattttgatatttgttttctgattgttctatggtctttcttctttcttcttgtcttcctttggtgaaggtgatttaatctgataatatgattttgttgcttgctttttattttttgtgtatccattgtatgtgttgtggtttgaggttaccttgaggcttgcaaatactatattataattcattattttagcctgataacaacttactatttacataaacaaacaagcaaaaagaaaatcaatacaaattctatgcttaaacttcatctgcccactttttaactttttattgtttctatttatatattattgtactgaccatttcttgaaaatttgttgtcattattattttttatttgttcattgtttattctttctactcaggataagaatagtttacataccacagttaacagtgttatcatagtctatgtttttctgtgcacttaactattactagtgagttttgtgcttccagatgacttctcattgctcattaacatccttttctctctgattaaagtaccccctttagtatttcctgtaggacacgtctggtgttgacgaagtccctcagcttttgtttgtctggaaaaatctttatttgtccttcatgtttgatgtatattttagccagataaagtattctagagtaaaagatgttttccgtcagcactttaaatatgccgtgccacacactcctggcctataaggtttccactgaaaagtctgctgccagatgtactggagctccattgtatgttatttgtttcttttctcttgctgcttttaggattctttctttatccttgtcctttgggagcttgattatttaatacctcgaggtagccttctttgggttaaatctggttggtgtcctataaccttcttgtgtttggatattaatatctttctctaggttctataagttctctattattattccattccataaactctctaccaccatctcattctctacctttttaatgaggtcaatactcttaaatttgcccttttgaggctattatctagatcctgaaggagtactttatttttttattcttttttcttttgtctcctctgactgtgtattttcaaatagctggtcttcaagtgcactaattctttcttttgtttgttccatgctagtaaaggatgcattcttcaggatgcctaattctgatgcattcttcagtatgcctgttgtatttttcagctctagaatttatgcctgattcttttcatttatttcaatctctttgttaaaattatctgatagaattctgaattcctttttttttgttgttgttgttctcatgaatttctttgcttttcttcaacacagctattttgaattctctctctgaaaggtcacataactctgtttctccaggattggtccctggtgtcttatttagttcattggattaagttatgttttcctggatggtgttgatgctagtaaatgttcttcagtgtctgggcattgaagagttatgtatttatttgtagtctttgctatctgcacttacttgtagccatcctttttgggaaggccttccagatatttgaaagaatttggatgatctaagctgtttctgcattagggggcaccccaagcccagtaacaccgcggttcttgcaaacttgtagaagtaccacctttatagtcttggaaagagaagatcagctatttgaaaatacacaaatagtggagtggagtgacacaagcacccctgtggacaccatcactatgactttgctgggtcagatctgaagccagcacagtactgggtctctcccaaggcctcctacaaccactccctggctactgcttatgttcaccctaagccttgagactctataatcacctgatggtaaagccagtcagatctgtgtctttcccttcagggtggcaaggtctcccaggcttcagatgggtccagaagtaccatttgagagtcagggactacagtcaaaaaccttagaagtctacctagcgtcttatttagctggctgtcaaaccacaagatgtagtcctccccactcttcagtcccctttccaaaggcagataagcttcatcccatatgcatcactcctgctacctccactggctatgaggtgtactgtcacactaccatcgatgtttccttaaggcccaagggcttctaagtcagattgtaatgaatgctgcgtgacctaaaactcacccttcagggcaataggctgccctctggcccagagcaggtccagaaatggtatccaagagtcaagtcctagaatcatggactccaagagcccacttggtgctctacactctgtggctgtgctggtacctaaggtgtgagacaaagtcccctttatttttccctctgattttcccaagaagcaggagttttgtcccatagacaccacagctactaatgtgctgagtcttccttgaagccaacatgtttcagaggctcacccaaggcccttaatgtagcacctgggtatcgctgctggttattcagggcccaagggttcttcagttagctgtttatgaatgctggcagaactgagtcctttccttaaaggcagagggttctcttatggccctaggtatgtctagaaatattgtctgggagctagggcctggaatggggcctcaaaactctgacaagtgctctatcttgctgtagttgagctggtatccaaaatgcaagacaaagtcttccccactgttccctctccttaaacagaagaaaggggtgtcttttggagccatgagttgtgcagcttggggttaggggagaggtgatgtgatgccagcactccattgactaccctagcttgtgtcttagtatgttaccccacactccaccaccccccagtccactgtctctgggcctaggtcagcactagggcagacctaagagttgcagtccttatggcttgcattgcctttcatgtttacttggagacagagagcactgtagcccttggtggtgaggtttgtgggatctcaagtttagactactgggattagtgattttcctctgtctagggctggtttaaatgctccctccatggttgggcatcaactgagtttggtccatttttcctttctgctctagcaggacagcactgagttcaaaccctcacaattgctgttttctctctcccccagtgcccagagacactctctgtactacactaccactgcagggggttggtagaggggtggcatcagtgattcaatactgtttttttctacctcttcagtgcctcttttagagatacaatgttaaaaccaggtactatgagtgcttatctgatttttggttcttatgaaggtgtttttttctgtgtagatcgttattaaatgggtgtcctagcaggggcaacaattggtgaagcgttctattacaccattttgttttgcctacccagctcataacaatttaatagaaaaaaacctacatatatttcaactgggatagaaatgtatggtctttataataatttatgtttctctcactcttagcaacaaattatttactaatttaaattgtagctaaagtgcaaagctcagttaaagtggtatatgcacctagtgaaataaaaaggggacattttaagttccaataacaacgtttacataccataaccttaaactttatatatttgatattgcccaataaagataattatttttcagttataatgtaataatgtcatagtgtgtgaccattcacagtaatagagaactttgactgctaataaaagagcaaaaaaacctaattaatgaagttctatggtgtcataataataatcaccatatcaaagggttctttcacttgactaagtcattatgcagatatttaagcagcaatttcaactattctatcaaatgtagataaagaaaaagaaggcactttgaacattcatacatgttttacattctttatggactcatctaagtctctaaaatacaaaagactcattgtatggctccattataaaagactccagagtagcattatgaaactcagcttatatactccgtcacttaaaattccaatttctacagtagaccacagctgcaattgacatctggtgatcttatttttctttttcctaccagtaatcaattctagaaatatttgaataagatatatgcaaggtagtatgaaataatcattaaacatacaagctctatagccacagtacatgcatttcagttctagctacattccttgctagctctgtgatttgggacaatctattaaaactctgtgtgccttggtgttcttgtctgtaaaaaggaggtaatattaattaaccacagatttttgtgaggattaaggtaattaatatatatgtaaaatgactcagaacattgatagcatataggaagtactcaataaaatttttgtgatggtattttattagtagtattattgccattacctacatgtctgtacacagaatatttaaatcaccctttaataaataaattagaatatctgcattccggaatgaaaagacaaatctcaaccttacttttcaaacttaaatttccttcctttaaagtttctatcaaaaaattcactacggaaaaatagttgttactcaaagatgaattaaaagacattctgtctatccattctttggtctacaagagttgcctaataagtatcacccattattatttttttattattaattacacacctactgatatattctgagctccaatgttttaacaatttagagatccataaagttataaactggggtctatcttatttattcccactttatcttatgtcattgtaaacgtacataaagaaccttcatttattcactcaccccatgaacaatatttgtttaatacttacaataaaactgggcagtatgcttagtactgttgttaaaaacaaagcttctgttttcccagagcttacagggtttacagggagtttaaactctccaaaatagggcttgacattgagatgtgggataaaatttttttcatttccatttgtatttcatcttatcctttaaaaaatctattttaggcatattttatatagtgcatacatatttatacagtgatatatttcagaaataaaaatattcatatattagaaaaaattaaaaattgtatcataagagcatgtaactgtttagagatcatgatataaacaagtctaaaaaagtataaaaatatgattatagaaatgcataaattaggaagagattgagaagtggacaattctcctaattttgacagtttagagaaagctatatcctgataatgatacttgtgattaaaaaaaaaaatgggtttttgtccagttacagagtcaaagagtagaagaaacgaataacaccagcagatatttaaggctgagtctaccaaatggggttacgaatgacaaaggttgtatgattgatgtgaagataacgtggaaatcgtgtactctgaacagtaagcagggctaagtcatgcagaatgccacatgttaggattggcagttgggatttcattgtgggcaaatgagaatttgttgagataatgaagaccaaaacaaggatgcaaatctgggcctattgaccacaaaagtgtattctcttcactgtgatagtagggtggagtatagcctatgacttgagactcttattaagcagttttaaacacaccaagaagaaatgatgagagttcaggctgtggtgctgagccagtagtgggcattgagatcaggagttgaatcagttcagcgaaatttaaagtatttactgtataggcaggtagagtgttctgtgtgtgcatgtgaagtgttttctgtgtggtcactgcttatactggcagcatgcagcataattactggatgtaatgtctattatgacattcaatatctccctcataaaaatattgatagatacgtttctgtgaacatgtctgtatttcttgataaacaagcaagattttttttttggtgagacaatttgaattgtacgatttgacaagtttactttctgtttcaagtttcaggaaggagggatgaaagttcatagccaattgattacttatattagcctaattttgctatgttcttatattttatcctctggtgttttaaaaatgtattctttgtgatgattttgttatatataattcattaaaactcatatcagtttttgaaaggaatatgccatacaacacaaatggttatggaattaaaacaataattccaaaaataatatcctgtaatttataaaaatgtacaattttctctgtgaatagagacactttaaccatgttttaaaaaaagggaaaacaattaggaaagttaaaatattttctaatcacatgagtactctcaaattgaaaacaatattaattaccaagacaccttcataaatatatatatttttatactgtgacctctatatttttattggaagattaataacatgtatcttagcaaccacacctggacccaaggcacatgggagagacttggcagcattcaaggtgaagttttttaagtttagaccgaatgccaacaaactatgtactactttgcttctaaaacatattaatacatttatctaaatagaaggaaaaacctaaggaaaaaaggtaaaagaataaggaagaaaggacagaaagaaggaaggaaaaatactcaatgagtaggtaaacaaccactcaatatgataaagcagagtgcgataatttaaggaaatatgaacttaagtgtccatctaacgccagtaaatagtaggcagattttaggtttgtgaccatagctatgggaagatatgggtgtacatataatgaacaattatgaaagataaaataaaagtaatgtttcttaaacttaagcaagccttattaatgcctgcacacatatcagaaacaatacctacatagactttcatggactaaggtatacgaatcttatgagaattcatattttccgactggagtcagatattaataaccccaacagctgcactattaaagttataagaataaagttagagcaaataaattgtaacacattgatgtgttattcttactaccattttatatatgtagaaatagatgaataagtttaaaagatgactttaagtctttaatgggtataacattcagaatctctaaaaattctatgtgtggaactagacagagaatgcataaagtgaaatttccccaggtttacagattgtcctgtgaaatcagaaaagattacagaggtgagacattctagagaatattgttgagacagggtgcatgcgcatttaatttgccttttgagccctaagacaggttaaaattagcaactcaaatttaattattttgacttagagcaaaagctttaaaattatggtagcttgctatatgattgtgtttgacttggatcctattagaagtattatgcaatctatttattttactcacaattttaatcgttatattcacattctgagagtcagaaaaataaaatgccctaaaatcttacaatcaataaattttaataatcttgagaaaacagcttactaaaatactgaatattaaaagctgaattactgtgtcatctaggatatggagaaatgatttggttctctaaaggggactcacagaacataatactcaggcaggaatgctttgccatgagccgatttcatttttactttctaatataattccaagggttcccatcagcatttctgtgaaaacacagactcacatacaaacacacaaaacaagatttttccccgcaggaggaaaaactaagtggcagaagaatgcatatcttatttattctccagaagaaagagatattagaagtcacacagtttaggttccttattttataatgaaaaccaataatatggattcaaacatagtaagggatgagttgggacaaaaacccttctctcttgattggatgtcaagtactactgttcttatctttgtgtcattcagtcaaagtatataaaaattaataatataaggcattattaatataatgtaagttgatataaatgtagataaaattaataagtgtggagaggccttgcatgatcaaggaagtttaacagaggagcagggacttgtgctggtcatggagaatgtagattatgtagatttaagatgggaatggcatacaggagggagagcaagcttgggcagaatacttctactccacatggtagagggcaaatctttatttatgtctcccttaactacactaagtatactgtaggagagataccagtaaccttctaaagccaggtctttcttatgtttttaagccagaataaagactttctaagagattttcacatatatcatttctcttgactaacacaatcactctatgagataatgttcacattttatctatgagtaaatcaaggctcaaacattttacctgatttatccacagtcacataggtttttagccacagagatggaattgaatgtcagtattatgactgcaagccctgtgttttccaatcacatcatagctaagactcatccagcctgacaccaagccagttctccaccaatgggaaatactggaagaaggtgcagacgcagtttgcaaagacttctgccactttttgtcaaagagatgattgcaaatttaatctggatttaacattaaggaattctatctcaattgtgttataaatctctttcccacacggccacttatgtgtcctcaggctctttcgttgggagaaaactcagagattaatgttgctgggatagctccaatgtcccacacgcattatatggctcttatttatattatctaactctaactagtcaagggtaaggaaaggatatgacaagatttcagtaagtttttaaaaaagttcagtttactgatacaggttgggcattcctagttctaaaatccactatccaaaatgctccaaaatctgaaatttttgagctccaacatgatgccacaggtggaacatcaaacaccgtaacaggttgcagtcaaaactcaggtgtgcaacacacagcttatttagcatccctgaggggaaaaagactctcccagcccagattcctcaggctagcctgcccacagagggtactaaaatgacacaggtgcaggtcagatggcaggtttcccatgatgcctcacatcaggccaacacccttgtgcgttactcactgtgttttgttgtatattctctgctctgtggtgtaaagatattattgaaaatgtcaaaaaggactgcacatatcccgacaggtaacagtgataagaaaaagaagcatttatgtgtactgtacagtgtatagaaaccttttaatcaaaacacagcatcatagttggagactgaaagcctgccattgtttgcggttgctgttgtctaacagctgacacaggtcttctggtgatgatactgtgctgctcagttaccatgaacacgttatttcttcactgtattagtggcatgccatctttttaaatcagtagtactaatgtgtgaataaatgtaagaaaatggtgcttatcagtggcatataaattcagagtcaggaatgacggtgatgacagacaaccacaggttgtccacatgggtgcgtgagattgtgacacctttgctttcggatggttcaatgtacatgaactttgtttcatgcacaaaattattaaatattttataaattaccttcagcctatgtgtaaaaggtgtccataaaatataaataaactttttgcttagacttgggccctatacccaatatatcttatgtatatggaaatacttcaaactccaaaataatccaaaataatttgaaacacttctggtcccaagcatttcacataagggatactcaagctgtaattatatcttaattcatgtcagcaaaagtcacaatgcaatgtttttattgttcagtggaaacctagtcatctacatttttgtcatctatttctttaagctcaaattgatttaaccaatgacttctcaaattcaagataaaatcaatcatatcactaaaaacaaaaccaaacaaccaagcaaaaacaaaaacactgactaaacatttaaaacatagccaagtagacaatgtttgagagtacattatagacagttatttatgtattaacaaatttaatttcaatgattggcagattttgcactataaaaatataactactcctttaatttaggcactgtggcagatatggaacttcttcaagtaaagacttgctttccagatgtggggaaagcagttagtagtgaagagcctgttagcttttccaggcttgcttcagcttcaagctacagtcacattcttcttggggtggcctctggccagtgactaagtgaggtcggtagctgagggcataccattatgaagacatccccagctaatgactgagtaaggtggtactaccaggatctccacattttctttcattcagtgtgtgctccagagtgcccagtagactggcagagattttacaggttttcaggatgctctgacatgaccctctgccccaacctgctttctctcatttcctttctcatgtttatttcccagtaactgtaaactgcaagatttgtttaatcctaggttagaaatgattgggaattcttatcagaataaaggctgagattttttttaagttaaaatgtcacattctctgtggcatctctgatatcttttggcatatttattcaagttttctggtaggttagcgacactttgttcatcctctgttacaatgtgtattatggtgtaattgtaattatttggtgtggttgccctctctaaatccacgaaataaagtagggtttatttttcccagtgatatctttgttggatttattagttgtctccgtataaaatacatatttagagacacattatttttcagataaatgttatcattttagaacagtagattgcgagagattggggaaatcaaagatggagaaaatgtttgagaattgtaatcagtgtctctctgctgagctatcgatcccttactttattctcataaagagatgctaatagctaaaatatgtagtgactttatgctcaaatcctagcacagaaattcacataaaaatgtcatattcggtgagatttagtaattctatgaagagtttagattagaaaccttgaactctacatttcaacaaccttttcctgtaaaaggataagaatgcaaaaaaggggaaccctatgatacaatataattctgggaaagtgtgtaaaagtgaagcacacacattttattaaaaatttctagtatagttaaaatttgtaaggaaaggcaaccaataaatcagttacctttggttgtggtttggtttctgaaagcctctgtagtgagattgatagcttcattcgataattatgttaaactattataatgcatgtcatatatggaaatcggttttataagcaagtgagataaatttattatataatactaagcctctagatataaatgttaaaacaaaaatatgtccccattttctagaagggtgcactgtgctatttaaatcaccctttgattgaaacagctaatagggtactttcttcggttcatgccatgaagatcgaaagttatgaaattcacatatatttttgaagaataaaaataatgtaatttactgaccggcagtaataataagataaaacaaaaaactgaatttaaacctttatttgtttaggaagaaaagaaaataaaactataattatgatgtgaataaaataatgttttccctgtttgggctattatcccattgttttgcctcaatgcttttgctaatattgcactacattcattaaagaaaaaaggcacacatggcaaaccacattttgccgtctgggaattaaaataatcttgtggccagccgagaagccacttatgcatggcatatatatccaggttcagaatccaaaggataaaagtgggtcatatcgtaatcaagaaaacacaaatgcaagctgatctgtacactaaaatcagacagcaatgctgagtggagtcagaatctgcagacaagagtgtgactaacaaaggaagagattcagctatccagagagtcgagacagataaatgaggacccagggcagaaatctaaatgcgtgggacaaagagttagaagtaagctgaagttgaaggaagcatctacaaaagaagtaagaggtgagagaatatgcctaatgaaattgtggagaatgaggaagctattgctgtagtttcttttgacccaaacatttctgtccctggttttcaaactcatggaacatagcttcaaacaaatgcttaaaaacaaggggaattttatgcatagtattagttgcatttatcaaatgcatttatcaaatgcccatgttacctttacaataagagtagttagcaaatgtaaacatgttttttgcattttcttgaaagtagaaagtaatatatattaggacacacccattgacttgactcaactatatttgaatgagcacaatctggaggaccttatccaaagataaagtctcagacattctagaactatcttgtctttgtctatatcagatgataactttattaaagcttcttacagctgtgatatttaatttatttatttatttattttgagatagggtctcactctgttgcccaggctggagtgcagtggcatgatctcagcttactgcatcttctacctctctggctcaagggatcctctcaccttggcctccacactagctgggaccacaggcacatgccaccacgcctagccaattttgtttattttttgtagaggcaagaccttactatattgcccaggctggtcttgaactcctgagttcaggtgatcttcccatgtaggcctcccaaaatgtcaggattacaggcatgagccattacaatcagctctactattttaattttaatgaaaaaagtatgtctgaaaattggttgtttaagaagtcttccttttgagggtgtatttttacaactactcagatgtagctaacaataaaaacaaagcatattaaaagtgtgctactagagaagacagcactactaaatttattatcatcagacttctgttcaaagatatcttttaaaacacctgtataaagttattaactgattaacctgctgagcaagggatcttgaaccaggggagcttgaggagaattcccactctgtcaatttttttaaaaaaatactgaaccaattaatttttaatatccgtttttgttcctatttttcatttttaaaccaaaatgacaccttacatcttcccacattattaaaatttcaggagtataaaggcattgactgactgaggcatttatgtaatttttacttctcaccttgtatggataccttatgaaatcaatataccagatattagagtatctgatattatattatattacatgcatatgtttccatagtatcacaggtgagcaaacatggggtatataaagtctgtaacatttaatttaatgtagaaagacagttttctttatttttccatttttaaaaattataatgtaccccttcaaattattatcaacaattatatgaaatttaagattagaaaaaaaatttagtattaaaaaacaactagagtaatctaattcaaaatcttaaaggttaatactgtttaaatttgagagttattagagattctattggttccttttccaaaatatttttatttttctccaatactccacgttgtgtttgcactgaaaaatagaacattgactaattttggtaatcagcaaatgacttagtacctaagtcactaattaaagttataattacacttttatcatccaccctacatttctcaggtctttggatttaggtctctgtagttagtcacttttcttgctacctgtcaggaagagataatgtgtcaaaatataacaagttcattatattctcttgtaagtgctagttagtcacttcctccttctatgctccaaatactcatcgaatatggccatgttacaactctttctcattgttttgtgattcagttttctacctctgtatctccaaataaattctgaatccaaagtgggtagtctaagttgcaatttttgggatgaacccaggacctaaaaaagtatcagacatattttgcttgttcaatttttgttgaataaaatgataaatatttttaaaggacaacagtttggatttatgaatgaggtctcacttatgttctcataactgattttccttcgcaatagcatcacagataagttactaactgaataattgtctgagatataattttatttttgttgaagttacgtgtttgaatttcatacacttacatatagagaactttatttcataagtttcaaagatgatatgttcaaaccatatcattagttttgaaaaaaatgaaattatatatatttggttatatttcaagatacttcaaacaattgaagaatatagaggtcaggtttgcataacaaagtgtggcatttcatctcaggtgatgagaggtatttatagttttttatttttcctccacccaaccagttttctgaatctctgataccaacttatgtcctacaattccatttgattctaactctaactaccaggagttagtatcagacatcacaggtttaaaagcttagtccctcaaaactgccctcaccgtagatgccacttgcaagtatcaggtgctcaggctgcctaccctttggtctaacttggctacaaagtcaagggttcccacaatctcccacaccaaggttaatttgctagaatgactctgaactcaggtaaatgctgtatttactattacagcttatattaaaggatacaaatgaacaaccagataaagtggtacatagtgcatggtccggaaaggtcctgaacacaggggccttggttcttatgaagttggggtatgtcgccttccacggacgtggatgtgtttgccagtttgaaagctccttaaaccttatgtttagtgtttttatggaagttttattatgtagccatgactgtgtccattggtaattaactcaatctccaaccttattccctcccgggagcttggaatctggggctgaaaatcccaagcttgtaatcaaggctgggtctttctgtgatgagccccttttctgaagtggatggtcctgccaagagttacctcattagaacagcagatgcttttatcagcattatcactctggaaatttcaagagttttagaagctctatgctaaaacaaataccaaatatctttcttattatactatagatgataagaaactcactactgttgaaaaataatttagtactgaaacaagcagtagggctgggatccataaggattcaggttttagtcccactctttagcagctgtataatcttgtgcaaaaaaaaaaaaattttaaattgtttagtgctcagttttcttatttggtagaaagagaagaagtagggttaaatgacttaaagcatgtaaaacacggagcacagagctggcacaaggcaagcactcaataagagagagctattattattttaattggggatccacaaacttctttaaagggccagctattttaatactttacagtctatagccagttcctgcttctaatactcaacatatcattgtagtgtggaagcagccatagatgatgtataatgaataaaccatccccataaaactttatttaccaaaacaaacggcaggccagatttggcctgtgggacatagtttgtccacatacctagttcacattatacaaatccagaattaagctactgttgtattgtatatcacctctacatttacataggccttgagcacatagaatgcactttgttaaattaattatgtattatttcctctaattctagtgccttgatgttttgggttgttatatccccccaaaaaaggcatgtttgagtcctaaccaccactatttcagaaggcaattgtatttggaaatagagtctttacagaactaattaagttaaaatgaggttattagaatggacaataatgcagtatgacatatgtccttatacacagaagaaatttgggcacagacagacatagtgagaaggtgatgtgaagagaggcagggagaaggtggccatctgcaagctaggtaatgcctgaagctactagaagctaggggacatgccagaaacaggttcgtccctagagtcttcaggggcaacatgtcctaaccaacaccttcattttaggtttctggcctctaacattttgaggcaataaatttctgttgtcctaagctacttgatttgttatggcaaaaaaaaaaaaatgcagattttattctaggaagttggatgctactgcctcaaatacctaaaatacgaaagtggctttggaattgggtcctgcttaaaagctagaagagttttgaggcacatgatacaaagaaaatgtctaaattggccgggaacggtggctcacgcctgtaatcccagcactttgggaggccaaggtggatggatcacaaggtcaggagttcgagaccagcctggccaacatggtgaaaccccatctctactaaaaatacaaaaattagccaggcgtggcagcggacgcctgtaatcccagctactcaggaggctaaggcagagaattgcttgaaccacagagtcagagattgcattaagcagagatcatgccactgcactccagcctgggtgacagagcgagaatccatctcaaaaaaaagaaaagaaaagataaagaaaatgtctaaattgccttaaagagactgttgatataaatatggacattaaagaagattctggtgagggttccggaagaggagtgctgtaaagagtctattgtcttagagagaatacatatatcatcacaaacagaatatttctaaaaacacaaatgttaagtgtgcttctggtgacatttcagacaaaaatgaggaatattttattgaaaactggaggaaaggtgatttttgttataacgtgacaaagaacatgcataaattgtgttttgctgggtgaaaagtagaacttgtaaatgataaactttgacatttagttgagaagattactaagcaaagtgttaaactgaagtcttgtttctctttgttgcctttagtaaaatgtgaaatagataaattgaagaagaaattgttatgcaaaaagaaaccatagcttaaggacatataaaatttctcagcctatccgtattgcaaagaaatgagaaaatgtgctctggagagaacaccaagggtgtggctggacaactgtcagaacctcttatagattagagtgtgacttatggatctaatcaggcatcccagcagacatgctgcagcctgcaattaaagagacagagatagaataaaatgaaggacagctgttagacttctgggattctagaagcagttaatggctgatagaggtatttacctgtaaatatgtgttctctgccaagaaaagggaagaatgaccctgaaagcagtttagaggctggtggggtgttgctgccaccagaaactgaggttgcaggcaaagaaatcagagttccttcctcttcagtttcagagcaaggggccaccaccatgttggaccaagagaacagagcatccagccaaagatgttaattctcatgtcttaaaatataactgttttatataaattttagaatttttttctatttctgtaaaaacatcactaagcatcagtaaaatgctaatcaaaatcataaagagatatcaccacatgcctgtaaggacaactagtatgaaacaacagcaagaaaaatgacattggcaagaatctggagaaattggaacctttgtacattgagaatgaaaatgctatatccattgtggaaaacaatgtatggaattactcaaaagattaaaaatataactatcatacgatctaccaatccacctctgggtatttatccaaaagaattgaaatcaggatcttgatgagatatctactactactactctccctgtttattgcagcactattcacaatagccaagagctggatgcaacccaaatatccatcaattaatgaatagataagcaaagtgtggaatatacataaaatggactattattcagccttttaacaaaaggaaatcttgcaatatgcagcaacatggacatatgatataaaataagccagtcacagaagaacaaatactgcatgattctacttatataaggcatctgaaatactcagtttcataaaatcatagagtggaagggtggataccaaggactgggaggaggggcaaatggggaattactaatcaacaggcataaactttcgaacaagatgaataagctgtagagatttgctgtataacattgtacctacagatgacgataatgcattgcactcttaaaaatttgtgaagggggtagatcttatgttaagtgccttaccacaataaaataatagataaatgtaataaagaattttaaaagaagcattcaaggatcaggatttaataaatatatttccttttttactgcttcaacaagaaaaaaaaatctaatggaattttccctggtagatttcagactttcctgatacacgtaaccccagttttccttccaatttctccctttggtgatggcaatagctatcctatgtctttcccagcattgtgttttagaaaacagattactttttgtctggtttcacagattcacagattgagaggaattttgccccaggattaatcatatctctagtttcacccataacacttatttaataagatttgtttcaatattattaagaaaatgttcatgctgaagcagtttgccatggaaatgaaaaaaatttttaaagaatgatttagaaaatatttataatgatgtatcttgaaaaaatgtcaaaatagcaaaaatatttagatttcttaaaagattttttaaaagtccttgaaaaaggtagaagtcaagaaaatttctcaatacaggcattgctttcaaatgagtaaatgttatcaatatgacaaatggaagccagttaacatatcctctgagtagttcttctaaatcatttttagttatatacaattattttgtgttttcacaaggactccaaggtaatgaagtcttctgtaacctgggattccctaactgccacagatgacaacttttacacaatgttaacagatgcttcacaaatgagagggagagagagagaaaaagaggatttttttttttttctgaattaagtaaggaacatagtgtagtcttttcattcactgggaaactggtgctaagaaaacatccttttttgtgctccagtataaactttatgccaactgtggattcataaattcaattctttttatcaatgactttccctgtggtatgcagctattggtactgaaagttgaatataattttgtgagtgtggatctgttgaaagccgcagatggagtgaaattgttcaacactattctctgtatcattcaagaatcttggacctaccagcagggagtcataataaaaggatcattaaaagttgcataaagagatgtgggaccattgatatgcctctgatgactggaggaacaccagggtcctttgcctcattcgtgccaatttagataaaaggacacagacacacgtggagtggctttaaggagacaagagtttaataggcaagaaagaagaaagaagctcccccatagacaaacaaacagagggggcctccaaaccaagataggaaaccccaagtgtgatgggaaacagtaggttatattaggaggccagaggagtattggtttgaccatatacgtcatttacgtagccagtgaaaaaactggccctcccacccttgccttttaatatgcaaatgcagggcgccatgatgtcctgcacacgtgaggttatctgggcatgaccatgatggttagcacacagggtgacaaggagaagagggtggaaatagccatattggatggacccagtttctgacggccattatttgcatatcaaagcttgccagccagccccttcaagccaattttctgctagataaaaaacttttctggagctgctttaaaagaaaaaaaccttaccaaggacctcttatcctctctatctgcctaaaataatttctaataactcctatgataccatgaagaacaagggcagtggtaggccttctttttatcctgggtaatgagaagtgttatatgggaggtggagaagggaagctacactagtgaaccaagtcttctataactctaaatatcatagctaggaaagtgccaacctttgtggctgaaagaagctgtcagagagtgttcctatgactgctattgttgaggctttctctagacactaacagggatttaaccagtgtcaattagccattccatagacacagcagctgctgcaacaaccaatgcttgtgagattgccacttttaagataaattagtacctgtgcatcaatcagtagacaaaaaaattatagagatgtgtacgaggatttcttcaatctgaagggagaacaagtaaaacactcagaacaaaaaggatcttgaaaacatagacatgttgaggttgatatgtaaacatttgaatagaaaaaaagcaagaacactcaaaaagattatagtataacatatttgatagaacaaaaatgaaataaccttaggccagacacagtggatcatgcctgtaatcccagcactttgggaggccaaggtgggtggatcactggagaccaagagtttgagacaagcctggtcaacatagcaaaaccctgcctctactaaaaatacaaaaaattagctgggtgtggtggtacatgcctctaatcccagctactcaggcgactgaggcacgagaatcacttgaacccagaaggtggagattacggtgaactgaaatcacaccactgtgctccagtctgggcataaaagcaagattctgtctcaaaaatcataataataataaaaagaaatagccttaggtgaggtaaaagagggtggttgatatggtttggctgtgtcctcacccaaacctcagcttgaattgtagttcccataatccccacatgtcatgggagggacctggtgggaggtaattgaatcatgggggtggttaccctcacgttgttctcatgttagtgagtgaattctcacaagatctgatggttttataaggggcttttatccctttgctccacacttctctctcctgccaccatgtgaagaaggacatgttttttccccttccaccatgattgtaaagtttctgaggcctccccagccctgtgaaacaataagtcagttaaacctctttcctttatgaattacacagtcccgggcagttctttatagtagcgtgagaatggactaatgcagtaaattggtaccacagagagtggggtgctgctgtaaagatacccaaaaatgtggaaatgactttggaactgggtaacaggcagaggttgggacagtttgaagggctcagaagaagacaggaaaacgtggaaaaatttggaatttcctagagacttgaagggctcagaagacaggaagatgtgggaaatgttagaacttcctagagacttgttaactggctttgtccaaaatgtggatagtcatatggacaatgaagtccaggctaaggtggtcccagatggagattaggaacttattgggaactggagtaaaggtgactcttgcttggcaaagagactggtggatttttgctcccgccctagagatctgtggaactttaaactagagaaagatgatatgatgatttagggcatctggtgggagaaatttctaagaagcaaaacattcaagatgaaagataacatcaaagtttggaaaatttgcagcctgacaatgtgatagaaaagaaaatcccattatcttaggagaaattaaagccagctgcagaaatttgcataagtaatgagaagccaaatgtcaatcaccaagacaatagggaaaatgtctccagggcatgtcagagactttcatggcagcccctcccatcacaggcccagggtcctaagagggaaaaatggtgtcctgggtggagcccaagtctcccctgatctacacagcctcaggacatggttccctgtatcccagctgcttcagctccagctataactaaaaggtacagttcaggctgttgcattagaaggtgtaagccccaagccttggcagcttccatgtggcacaggttctgtgggtgtgtagatgacaagaattgaggcttgggaacctccatgtagattttagaggatgaatggaaatgcctagacatctgctgtgcaggggcagagccctcatggaaaacctctgctagggcagtgcagaaggaaaatgtggggacagagccccacacagagtccccatttgaacactgcctagtggagctgtgagaagaaggcaaccatcctccagaccccagaatggtaaatccacttacagcctgcaccatgcacatggaaaagccacatgcactcaattccagccacgaaaacagctaggagcaggggttgtaccatggaaagccacagaagtggagctgctcgaggctgtgggagcccaccattttcatcagcataccatggatgtgagacatggaatcaagcaagatcattttggcactttaagatttaatgactgccctattggatttaggacttgcatgaggcctgcaacccctttattctggacaatttcccccatttggggcaggtgtatttatccaatgtctgtaccctcattgtatctaggaagtaactaacttggtttgattttacaggcttataggtggaagggacttgccttgtctcaaatgagacttcggactgtggacttgtgagttaatgctgaaaagcgttaaaactttgtaggactgtaggaaggacatgattgtgttttgaaatgtgaagacataaaacttgggaggggccaggagcagaatgatattgtttggctgtgtccccacccaaatttcatcttgaattgcagttcccataatccccacatgtcatgggaggggcctggtgggaggtaattgaatcatgagcgcgattaccctaatgctgttcttgtgatagtgagtgagttctcacaagatctggtggttttataagaggcgttcccccttttgctcaggacttctccttcctgccgccatgtgaagaaggatgtgtttgcttccctttccaccatgattgtaagtttcctgaggcctccccagacacacagaactgtgagtcaattaaacctctttcctttataaattacccagtcctgggtccatctttgttagcagtgtgagaatggactaattcagtgctcattgctggaacaaatattaatggcctgcaaagaatacatcaatttgcatagtcaggatggaaagaaggcagaaaggcaagcaaaagtaagagagagagcaaaaacgaaggcaaagaggaaggattgagggaaggaagggaggggggagggagagtggggaaggaaggaaggaagaaaaataaagaataaaaaaaacttttaaggcttattgattgaggtcatatgcaaatgaaagtaatgccaggtagagaaaaagaatcaggggcaatgcatttaaaaatcaaataaaaatttcctaagattgaaacaaaaattttgatcttaattgattagacttgaaattttagacagcattgatgagaaaagatatatacctacaaataacctagcaaaacttttggactactaaaataaaaggaaatattatgtattttcaaataaaagtatttttaaaataagaaagacaaaatatttgattaagataagaaatatcatactagaattgagaggatggtcagataacaactataagttgctgaggaaaaactacttcaagctaagaattgtatcccttgtcaaggtatcactcacctactacagtaaaataaatagatatggacctgtcattagtaaattaatgtatcacacaactaagaggataaaattaaaggggtaaggaaggagagagggatgatttacttattcccaaactttaatcttatacagcatccttccacaactgatattctgagagatattaagcctgcaaaaattatttgagtattttttaaaaaattattccaaggatgaaaaatagctaatgtcattctagatggacattctagttaagttaattcactacataaaatatattcatggtttattttctcacttgagccttgatgaggagaagtggtagaataatagagtatcataatatataaaaacatctgataattcaaaaggaggtaggcattattgtaagagaaaagttagtggtaatttttagtagtttaaaaataacttaatcacataaacaaaaataaggaacgaacaacaaaagaaacataactaatgagaaacaaaaaggaagatataaatgtcaagtttatcagttgttctactggatgtgagtgatctgaaattccttaccaaaatattgagactatcagtgttacactaggtatctagtcaggtattagcagagcagaatagggctctcctccaacacaccaagagtgttgggcaaccatcaggtgtgatggtcaggcagttgttaactgcttctctaatgtaattggtcacagccagtgccagaaaaaggcagtctcctaatagatagaaaatacctgaaattgatcagcagcttcccaataagatttgaagagtgggcagaagtaatgcaagatcctagtagtttgccaaagtataaaaccccaagtcaagaggtcaagttgtgcacttggtctctcaagtcaccggcttagccctcttccaagttgtactttccttctttgatttctttctttttctcattgttctaaagctttttagtaaactttcactcctgctctgaaatttgcctcagtctctttttctgctttatgctcctcagtggaattctctcttctgaggaggcaaggattgaagttgctgcagacccgtatggttatactgctggtagctcagggtaacttggattcctgccacaggtaacatcaggagtaaaaataaaacaatttaaaataaaatgttagcaaatataataaaacagtttataaaaataatgcaaaaatcttatattcaaaaatatatcattcattatattaaacttcataatgatagttatatgggagaattatattatcttaataaatggtgaaagacataatgaaattcaagtgtatgttaataaggactctaaatacattgggaattgaaggaaatatcttaaatatgagtaagactatttaccaaaaatcaagaaaaagcataacttaaagtcatttccaaaaataataacaaatttgggatgtcatttactttgctgttattctattttattttagagcttttagtaaatccattgagttaaactttataaactttggtaaatattaaaatatcattttgctaatgaaattattgtacagaaaggctcttggttaaaaaatataacaaataaggtaatttgaaaaagtagttaaagaaaatacacaaaaattaatagatcttatttgtatgccaattataagtatcttaaaataacaagaaaaggactgagctatacagacaaaatgataaaattttcttgatgaatggaaaacaacagtcacctattcttggatagtaaggcttaataacataaaaatataaattttcccataattaatacatatattttataaaattttaaatgtaatctcaagggaatgttttgaaatgtaaaaaatagtattaaaactcatatttaagactgtgtataaaatagccaaggatattatgaaaacaaagacaaggggactcttaacaaatatactaaaacttttaataaacggaatggcactagaataagcatagacaaataaatcagtgaaacagaagagagtagcaaaaataggtcaattttatggattttaatttatgagaatagaaagtactaaaagtcaatagagaaaatgattcactcaataaatggagctgatatcattggctatccagcagaaagacaataaagttggattcatatgataccatccgaaaaaaaattaaggtggattaaaaacataaaagctaacacccaaaaaaatacgaaaatttagtaggctctaattacaacttaggaaatgagaggacctttgtaattaaaacagtatgcttagagaaatcatagacaaaatccataaacaacagacaatggtatcagaaaagtatttacctcccacatacaaaaaatttagtcattcattcccaacatattcaacaaacattgagttcatgcctgtcaccaggagctgctcaaactgacaagaatagagcagtaaataacattcacaagtgctgtgctttcctgggttacatgacattggaggtagcagacaataaataattatgtaacatgtcaagcagttataattgccataaagaaaaatgatgtcagttaaaggaatagagaaagaagaagtgtggtgggggtactaatttatataggagagtcagggaaaccctctgtattaagatgccatgtgaccagaggtatgagtgaagtgaggatgcaagcagccaagacaatatctgggaaaagagtggaccagaacagaagcacaaagtagagaagccccaaggtggagacagcaagaacgacagcagtgttagattggagtgtgggagaaaacgctagagaggaagatggatagagacaaaggaccacaccacacacagccctactagacatgaaaaggacgttgattgttaaccggcatgagatcaaaaaccatggagaattttgagcaggagaattgcattatctggcttatttttcaaaaggattactctggaatttctggaattttttcataaaattagaactaccaaaatttatggatatatgtaagaggaaatttattgcagcacaaatgttggggggggggtggatattgaaacaaatgaatgagaatgattaaacaaattgtagcccagcttcaccatggtatattattattattattgttattaatttttttttttgagacggagtctcactctgttgcccaggctggagtccagtggcacgatctcggctcactgtaacctctgcctccgaggttcacgccattctcctgcctcagcctcccgagaagctgggactacaggtgtccgccaccatgcccggctaatttttttttgtatttttagtagagacggggtttcaccgcgttagccaggatggtctcgatcttctgacctcgtgatccgaccacctcggccttccaacaccatggtatattatacaaccactgaaaagaagcagttacagcaataccagtcttcatggataaatgtttaaaggcagaaggtaagacacttaaaagtaaaatagtccaatttttctaaaaggagcaatgatgaacacccctctatagataacttgaatatgttttgtagcatcaaatattttattattccgattttctaaaatatgcatgtatataaaaaaggacatcaaaaggataatggtgccatctttgcataatgagatttcaggtggcttttgttgtcatctttctattttacatattatttggatttattgagataattattcataatatgaatgatcagaaaaaaatataaacttaatttttaaatttatttctaaagactcttaaaaatgccataataggaaaactattaaattttatgcaactgtttccttgtttttttttttttgtttgtttgtttgttgttgttgttgtttgagacagagtctcactctgttgcccaggctggagtgcagtggcatgatcttggctcactgcaacctctgacccttgggttcaagcaattctcctgcctcacccttccgagtagctgggattacaggcgcctgccaccgtgcccggctaatttttttgtatttttagtagatatggggtttcaccatcttggccaggctggtgttgaactcctgacctcgtggtccacctgccttggcttcccacagtgctgggattacaggcatgagccaccacacctggccaactgttttctaatttatctgactagagtaccgtctttttagcagaacacctaaaagcttctcttgaaacaaactaatgttccttggtaaaatatcatagaacgtactgttctaataagtctatcaaaaaggaatgattaaacacatccatgacgatggtgcttctgggaagtacacatagattggtgaagttctgctccacgttaatatgaaaggctctgggttttattttcccctgaatcaaaagaaggatactgaataaattgccaaaggacatgaaagttttaaagttttattcaaggagcaccctggcacaattcactgaaagagagagatgaatatctaataaactcatgaaaaaatgttcatggccacagttatcaaagaaatgcagattagaatagggtataatcgtttgcctttaagttggctgatttttaaagaataatagctttgagggtgcgtagactagcattcaagtacgttgctggtgagagtgtacattggtgcaagctgaaaggtaaataatttgcattaaaaagctcatatacctacaagcagtgattcttcttctaaaaatatatcacaagaaaatcagaaacatggacatattattttgttacaatgatgttcactaaagcattatttttaaaggaaatgattatagtgtataatatgcctgaaaataaaaaatattcataaatactttttagtattatggagaaatgttcacaatacacagtatgttctcaaaatatttgcatactcatattaaaatatgctaactaataaaggaagaaaatgtgctaaagttaataatggctatgtgattactctgtattgtaggattttagataacttctattctacatgtagttcatcttttaaatcattcttgtttacgagtttaggaataggaaagttaagtactagagtaaaaaaatctttaaaagctgcaaggaatgttatgttatttgtaacatatcttcagtattaaaagaaattatcaattgtctatcagtaaagactaaaatctgtttgcttcttgtgtaggatatttacctgaaaagcaaacactttatattaatcaagaaagaaattgaaatatattttagataaattttaaaatagctttattttggatagaggagaaataaaataatttctgcattttagtaaaatagtgtacactctgcttcaggaagcaatgtatactttgaccaactaaatgcaaatgtcaacacaaatgctgtacagcattccaaggaatcaaataagagccaggaagagggaaaaatctatgttagggtaggaatcatagcaaaatttcttctgagattaaaaatactaaaaatgtacaatccacattttgccattaagcaatacatttcctgataactagagagacgccatctaaaatcatgaatatgagaagattaatgctctaaaatcctattatttcatcaccatataacattgaactccatcaggaagttaattatcagatttcctaactatgaataaaaaataaattaaaaacatcaatttacagttcagtggagggatagtattaattgagagaacattcaaatgtgtaattttcaaatttaataattttaagaatgaaaaccttttgctttttataacgtgtttagttagtttgtttgtttataaggaagagcatctcctgaaactactgtctccacaagaataggttaacctgatgtgtcaagttgagatcattgaaccctgtgtagagcacttctgtttcccaagaactgcctccacaccagaagcctctcttcaaattctaacaggcatttttattcattttaccaaaggaactactgataacagatatcagaaatacggagcttcttaaataacaactgaaaattataatttgagaagaaacaacaccatcctaattaattagctgtgtccacttcattcattcattcaacaattactgagcatctcttatgaactaagactatgttaagtgaagtgtgtgcaacagtaagaaagactgatatggttttaatataataaatgccaaactagcggacataccaaggggttatggaagtacatactgtaggcaactagggaagttaaagaattctcagaagaagtgacatcaaaattgagaattaaaatatacaataatcaagaccagccaagccagcatgctgaaactccgtctctactaaaaatacaaaaaaattagctgagcatggtggtgggagcctgtaatcccagccactcaggaagctgagacatgagaatcagctgaacctgggaagcggaggttgcagtgagctgatgtagtgccactgcactgcagcatgggtgacagaatgagactctgtctcaaaaaaaaaaaaaaaaaaatagcaagaaatttttgttttgcctaagcagagttagccagagtatctccaaaattgtataaataaggtttctggaagaattaatcttggaataggtgagaggttcattagaggaagtcagtgtggtagttttagatatatatgagtagaaaatcatccctaaaatatcctcttaatgacaaggattcttacaggctaccaatcatgtgaccaagtcataaaattaaaaaattaaagcagaatggcacaaaaaattaatttaaaaagcacagttaaatagattagaattaatgaaaaatgacaaaattaacagcaaagaaaaaataataaaatacttggaatgtgattttaataattagatgaattatttaaaaggaagctaaactgtgttttaatattgtaattagaagacaatagatgaaataaacaggaaaaacaaaaaaggataatctagcaatagcaaaaagttttaaaaacttaaaaaagaataaaaaggttttcaaagatataaaccagagataaaaatctagaagtaaaataacgacaatagagtataagatgatgaatggtgataaaagaaatatgtagcaggaatcagagtaagagtggtatcaattctggggagaagccaaccattctggcaggccaataaaattttgcttaataaatttatgcaaatgtatgccttcgatgaaaagatgtctggatgctaaaaaatgtcccctaaatttgttttcttttcttcttgacaaaagcctggggggcagagttccacaaaggcttttttctctcacctttcatttgcagcaacaggacagcttgtaatttgagcacaactttctgtacctgtcagtgaggttaaggctcttgcagaaggatgctgaagagtatcagcagaacctagcaaatttgtagccctctggcctcgggcatgttccactgcctacttcattttgtaagggggaaatatatttaaactcaaagtattgttttatttgttcaaataaacaatgcaccccctcctgaaggaatcatatctcttttctaatgacaactcagtatttattaatatatcactatgattagtttcagtcttactcttatttcagtccttgctgggatataaaatcttgtattcttacaagaactgctgctttggctggacaggataacaaatattggtttcactgttccccatgtttcgggcttaataaaatccaagttctctatattcaagaagatccttcttaaaatctatcattatttggtggtctctgctgatttggagtgatggagtaaatatccagcctgttcttatttgaattacaattggaagtgtaatgtgtctactaagcatcacatatgctttgaaactgggaatgaatggctgaccgaggagcgttatgcatattgtatatgcacagtatcacacagtgaagctatgattaagagaggcaaggaaaagcccagactctcaaacgcatatgcctgggatagaagaaaattccttctgggcagtcttttcaaattacagcatatgggatgcttgagttacctttttttcaggtaagaaaaaaagataattttttttaaaaaagcactgattttaacaacctaattttcctgattttctattttagcaaaaagttctacagcaggcattgaagaggtaattaaagccaagatattcagcaaattaacttcaatagcattggaagagaagatataatgctctagggtatgtcgtgtttagtacaatatgcttatatgattttgagaaaagaattgaaaaattaagtgtaacagatagagcatactgttctgcatcaccttggcattgttaaaaccctcgcctgaaattgttacctccccatgcaaattaatagtccttcaatcaacttcaggcatgcatgccctagattgacctaggtcttaactgggttatataggatatatgcatttataatgagatatagtccttttcctaaagggaaggtctggatgaccttcatttgtctttttttttcagtaaaaatataaaatttaccattttaaccactttttaatgtacagtttagtaatgttaagcatattcacattattgtgaaacaaatccccagaacttgatggtagcagtggcctgtctggaatagccactgcgaagatgccagctgcattggtgaaggtgaatccggggctgtgcactccatagagccggtgggagccagcaacaggtgggaaacccacccctgattgttttgatatctggtagttctgatttgtgtttctctggtgactattgatgttgagcatttatatgtttacatcttttttagacaaatgtctattcaagtcctttatgtgttttttaatcaggttgtttgtttttgttttgtttaattttgtattgacttgtaggagttttttaataatattcttgctattaaccttttattagatatatgattagcaaatattttcttgcattctatagattgcctatatattctgttgattgtgtttaagctttctttttaagtttgatgtagtcccatttgtctatttttttattttgtttcctgtgctattggtgtcatatccaagaattgattgccaagtatagtgtcatgattttaccctggtttcttctaggaattttataattttaaggtttccatttaggtatttaacccattattttgacttaatttttgtaaatggtatgagatagtgggccaatttgattgttttgcaggtggatctctactttccttaatactacttgttaaagagactgccttttctccattgagtggtctccattgagtggtcttggaactgttgttgaatttagccatatacacaaggggttacttctgtgctttctattctattccactggtctatttgtctgattttatgtcagtatatcacactgttttaattactatagctttgtaatctgctttgaaatcaagaaatgtaagtgatccacctctgtcctttttaaaaattattttggctactttgggtttcttgacattatctatatttctaggatgaactttctatttttgtaaaaaatgccattgggcattttgatagagattgcagtgaatttgtagattgctttggctactatggaataatatataaccagctgttgtttcatggagtggtctaatttacctatagcacttttaagtcctatatttctttattatattctgcctagttctatccactatgaaaagtgagatattgaagtttcctactatttttgtgttactatatatttctttctttgattctgtcaaggtttgcttcatatatttaagagttctatgatttggcaaataaaaatttataactgttatgtcttcttggtgaatggaccctgtaattattatctaatgccccctttgtctattcagcctttaaaaaaattagcctatttttaatattagtatagccagtcctgctctcttttgattaccatttgcatgaaatatatcttttctcatcctttcagcttcagcctatgtatgtctccagatataaagtatgtctcttatatatatcatataggtgaattatatatttttaatccattcagctaatctgtctgtttcattgtggagtttaatccatttatatttaaaataattattgatagtgaagatttattattaccattttatttattgttttctatacatcttgtagcttttttgtccctcttttcctttcttgtttcctgactttgtgttttgttgattttttgtagccatatgttcgattctcttatttccttttctgtatattctataaattgtatgtgcatgattaccattgcaattacataacgcatcttaaaatacaaaattctgttttaatctaataacagattaatttaaatcacataaaaatctccaccccacactctttatgttatcgatgttaaatttttatctttatatactgtatacttattaacattaatttgtaatttaatggtttttgtcatttaaattctatgtaccaaacttactgtagtacaagttagtacatttgtccatgtttttacctttgccagaaaactatattttttgtaaagctgcaagtttctagctaccaaattttcatctcaaattgaaggaccaactttagcgtttcttgtaaagtgagactagtggtaatgacctccatctgcatctgcttttgtttatccaaaacagtcttaatttctctttcttcttcttcttttttttttttttttttttttttttgagatggagttttgctcttgtttcccaggctggagtgtattggtggaatctcggctcactgcaacctccgcctcccaggttcaagcgattctcttgcctcagcctcccgagtagctgcgattacaggcacctgccaccatgcccagctaattttgtatttttattagagatgggttttctccatgttggtcaggctggtctcaaactccagaactcaggtgatccgcccgcctcggcctcccaaagtgctgggattacaggcatgaaccacggtgcatggccatttttttttttttttttttgagacaacatcttgctctgttgcccaggctgagtgcaatggcacaatcatggttcactgcatcctcaacctcccaggctcaagcaatcctcctgcctcagcctcctgaatagctaggactacaggcatgtgtcactcacactcagcttacttttataaaaattttttgtagagacagagtcttgctctcttgcccaggctagtcttgaactcctgggtgtgagcaatctttctacctctgcctctctgctttgcttttaaagacagttttgccacatgtagcattattccttccctattcttttttctttcagcactttaaaaatatcatcccactcccatgtgacctacaaagttttgctgaaaaatctgccgataatcttatagaaactgccttgtgtgtgatgaatcacctttcttttgctgctttcaagactctgtttttgtctttgatttaggcagtttgattataatgtgttgcagtatggtactctttggatttagtctagttatagtgaggttcttgaaacttatgttctagttttttcctcacttcctcagatttaggagatcttctgccattatttctacaaatgaactctctgccctttttttttttttctcctttctctttctgggactcccacattggtttgcttgatagtgttcgataagtattatggcttcataagtacctaaggttcactgcacttttctttagtttagttttcttttgtttctaacaagagctgaatcaaacagactttattcaacattttaggatgaggaaaaaatgatataaaataagtcataagaaatactttcttatactcacaccattttcaatgttttgcaaaatgctccatagcaaatgtgaaaagcttcaacacactcttataacttctgctgcaataaatgcaacattaagcaaacacacaaatttcttctgtaccaaccttaaaatttgaattactgaattgctaattgttatggtgtcactcatacatactttcattcatacactttaatgagatcattgtctgtcatgtagttatcaaaaattttacaatatattgcacaggtttatagtacaatttagaatctagctccttactatcagccacttttctgattgctttcatggtcttcctttactacaaaattatgatcagcacaaattgcaaacatatctgcttcagtacaaacatttctcagggtctgcttcattaaagccatctgaaaacatcacaaaattgctttacaatcgatttcaccatggtttgaaatgggatccacatggactttcaatatgcctaaatttgcttgttcatttggcaaatcagtatgtacttttctatctaatcttcttggatgcagcaaagcaggatctaggaaatctggttgacttatagccatggttgttttaactctatgcagagtatccaatccatccatttgattcagtaactccattaaagttctctgaatctctctgtcaggtgaattactctcagaaaaccgatagctaccaacaacacctatttcacctgtaaaaaatgatgcatgaatatgattttttgaaggtgagatgtttctaactgtgtggcattatttccaggctctgtcttctgttccattggtctatgcatctgcttttggacagtagcatgctgtttttgttactgtagccttgatcatagtttgaaattgggtaatgtgatgcctccagctttgttctttttgcttaggattgccttggctatttgagctctttttggtcacatgtgaattttaaaatagctttttttataatcatgtgaaggatgccactgctagtttgataggaatatcattgaatctgtaaattgctttgggcagtatgaccattttgacaacataaattctccctatccatgtgcatgaaatttttttgtgtgtcttttgtgtgtcatctatgatttctttgggtagtgttttacaactatcattgtagaggtctttcacttcattggttaagctctattcctaggtgtcttattctatttgtggctattgtaaatgggattgtgtttttgatttggtactcagcttcaatgttgtcgctgtataggaatcctactgattttcatacattgctgttgtatcctgaaactttgctaaagttatatatcagaccaaggagcttttgggcagaaactgtggggctctctacacatacaatcatatcatctgtggacaggaatagtttgacttcttctctttttatttagatgcctttaatgtctttctcttttgtgattgctctgggtatgacgtccactactatgttgaaaaagactggtgaaagagggcatagttgtcttgtgccagttttcaagggggaatgcttccagcctttgctcattcagtatgctattgtctgtgggtttttcatacatggctcttattagtttgaagtacatttattcaatgcctagtttattgaggctttttaatatgaaggaatattgaattttatcaaaagctttttctgtatctattgagatgatcatgtggtttctgatttaattttatgtggtgaataaaatttactgatttatgtatgttgaaccaatcttgcatcccaggaataaagcctacttgatcatggggaattagcctttttatgtgctgctggattctgttagtattctgttgaggatttttacatctgtgttcatcaaggatattgtcttgaatttttttgttattgttgttgtttctgccaaattttgttattaggaaaatgctggcctcatagaatgaattagaaaagagtccttcttcctcaatatttttggaatcacttcattaaaaatggtaccagctttttcttatatatctggtagaattggtctgagaatctatctggtcttgggctttttcttgttggtaggcattttattattaattcaattttggaacacattaatctgttcagtgtttgaatgttttcctgattcagtcttgggaggttgtatgtatttatctctaagaacatatttattcattctaggtttgctggtttgtgtggacagggtgttcataatagtccctgagggttttttgtatttctgtagtgttggtggtaatatctcctttttcatttataattgtatttattaggttcatctctttttttctttattagtgtagttagtggtctacctatcttattaattctttcaagaaccagctcctgaattcatttgtcttttttcttcttttgtatctcaatttccttcaattcagctctgatatttgttatttcttgtcttctgctagctttggggttagtttgctcttgtttctctagttcctctagaggcgatgttaggttaatttgagatgtttctaagtttttgatgtaaacgtttagtgccataaacttccctctaaatactgcttttgctgtgttccagagattcttgtatgttgtatcttttttctcattagtttcaaagaatttcttaatttctgccttaatttcattatttccccacaaataacttagcagcaggttgtttagttttcacttaattatatgattttgagtgactttgttagcaatgatttctgtttttattgcactgtagtccaagaatgtggttgatattatttcattatttttgttttagtttttgataagggttgtttcatgcccagttgtgtggtctactttacagtatgtgccatgtggcaatgagaaaaatatatattctgttggttttttgtgcagagttctgtaaatgtctattaggttcatttctttaagttgtaagatccaaaataatgttgttcattttcttccttgaaatgaacaacatttcaaggaacatattactgtcagtgggatgtcaatgcagataattgaaactagaccctttccttataccatatacaaaaattaactcaaaaatagattaaagatttaaatctaaaactaaaaactatataaacaatgaaagaaaacctaggaaataccattttggacataggagcttgcaaagactttatgacgtagatgccaaaagcaattaaaacaacaacaaaaaaagtgacaaataggacctaacaaaactaaagagcttctgcacagcaaaataaattatcaaaaaactaaacagacaaccttcagaatgggagaaaatatttgcaaaatatgtatctgacaaaagtctaatatccaggatctataaagaacataaacaaatttacaagcaaaaaacaaacaaccccattaaaaagttgtcaaagaacatgaacaggcacttttcaaaagacatgcacacagcgagcaagcatacaaaaaaagttcaacatcactaatcattagagaaatgcaaattaaaacaacaatgagataccatctcacgttagtcagaatgcctattattagaaagtcaaaaaataacagatgctggtgagattgtggagaaaaggaaatgcttatccactgctagtgggaaagtaaattagttcagccattgtggaaagcaattttgtgatttctcaaagaacttagaaagaattgccatttgatccaacaattttattaatcattactcaatttcattattaagtattgatcaagaagacttcatgaggcaaaataaggaactgtcaaacataaagacaggtaatttgaaatcactaagtcagaggagctaaaaaaaactgtgaggtttctcatcatggtactccctagaggtaagctgcttcaggactaccacaggaagctaaaagagcataaggaaattgatggccatcttaaggagttaaaggaacaattaactctagaacttcttcttctttttctttctttttttttttttttgagacagagtctcactctgtcgcccaagttggagtgcaatggtgcaatcttggctcactgtaacttctgcctcccaggttcaaggaattctcctggcctcagcctcctgagtagctggaattacaggtgcacaccaccatgtctggctaactttttgatttttagtagagacaggatttcaccaagttggccaggctggtcttgaactcctaacctcagatgaaccatccgccttggccccccaaagtgctgggattacaggtgtgggccaccatgcccagccaactctagaacttctgattgaatctttctttataggttctatactatcattttgttcaataatcatttttctgttttttatttagttgaccatttgtattttttcagctccttaagcattcttgtggatattattttaaattctttattactcagctcatagatctatgcttctttagagtttttttttttctggagttttattttgcttttttaatttggccatgttgttttctgtttctttgtgggttttataatttttactaggatttgagcatttgcaaaacaaaactacctcttcctgtctttacatactgaatttgttcaggtaaggactctcatcactcaggctgattgtaggatgttcttttttttttttttctgaaaaaacattttttctaatatcttgctctccttggcatcttcccatagaactggggctctaatatacttctcacttctttcttaacgacttccaaactctgccaccagtcctgtcagccctctaactctattgaggcagaaaacagtttctcatgcaggctcaagacaaactagaaagtttaacacatgctcaactcttttatttctgtcctaagggagaagctctggtatggtgtggtttcctcctgtttgctctgtattgtgctacatagggagaagagcacaaatagtcatgctgttatgagatctttggggtgtcaatttttctggccagaaacctcggtggccatggcacctttgccagagttcttgtcctgcgttcaagatgaatcaggtatgcaggcaagtgaaaggtgagtaagaagagttttatttagtgttagaacagctcagagaagtgattaactcctctctattggcaggtcatccctatccagtgttcagctctaagcaaagaggaggacttggagagggtaactcctctctgcaggcaagtcattgggatgtctgcacaggtctctgaagctttcagcagagggggtaactcctccctgctggcatgtcctctttgcagctcccagtggagagggtattcctctctgcagcttgtcatccagtctctctaccctcttccttctctggccatcctctaacctgctctggctgagcccagggcttttatggacctcagaggggaggaagtgcatgctgattggtccatgggtggccatgggcaggcccggaagaggcaccatgagtccccactctggtctaagggactggcagcccagcccccagacttcaggccctctctggcctgaggatggggccttactggggaccccacccacttctgcccagaactctgtctgcctccccctgccattcatggcctgggggcttggcttcaaccaagcctccgagattggagcagatgccaggaacagagagaggccagacagtggaagcagacacccctgagcctgcagggaaggggtgtggtgcaggcagggtgggggtgtccttcctggggtgccaagggtgcaggctgcagagacacccgggtcctgtgcctgggagggcagccgcagctgcacccagagctcctgccccaccaactcagaaggggcagggctcccgctagtccctgcctcctgtctgcttccgggagccagaggtccaggtctgcaacagcaggaatggctgttcccggctgatcctgcctgttcctggctcccccaagagcacaggggggctcagatccacagctgcagtttgggaggctggaaccaagggtggggctcctgcctgctccgcagagctggaggcctgggtctacagctgcagtttgtggctcccatcccaagaaggggcggggcttccaccagctccatggagtgtgcagccccagccatgcagctgatggcagcagctgctgtcatcaatgccagacaccacaaatttttctacccttttcactggaattcctttttgtttttacactaacctgggtgctgtagcttcacatttcatctctagaattctaacagatattgtcattgctattttgttggtaactttattttatttttattttttattttattattatgttttttgagacacagtctccctctctcgcccaggctggagtgcagtggcaccatctccgctaactgcaagctccgcctcctcggttcacgccattctcctgcctcagcctccagagtatctgagactacaggcatccaccaccacacctggctaattttctgtatttttaatagacacggggtttcaccgtgttagccaggatggtctcgatctcctgacctcgtgatccgcctgtctcggcctcccaaagtgttgggattacaggcgtgagccaccactcccagccgtattttgttggtaacttgatgtctttgtggaggaataatggtctgtagctttctaacctgtcatcttgctgatgtctaccttgtttgtttgcttttcaacaattttttttaacttctgtcaggatttagataatcttctaatagactccctaccttaatctttgccatcaccaatcaaatatttaaattactaatctgatcatgctacttcattgcttacatttttgaagtagcgtctttgtctacagtgtaaatttcaacctcatgcacatacttcacctggccttccaagacgcatacctcatccaaatttttctcttcatcttctaatgccctcttcagctcatgtaactttgcaccaacaaatgccttcattattctcctgttgattaatattttcattctaccatgatttaagtattattttacctgtcaggatcatctctttttaccttcccctacttatcttatgatctactcaggttttggcttctaggtgaactggacctattacagttgaattaaatatttctccatgctcctgaaaatgctctatcatggcattcattaaattgtgttttacttacttgtatacttgactattattcccttttctattatcactacttaacatgaaatccacatagtaggtgctcaataattgtctactgaatagataaataaaataattgccctgaaatgtactatttaatattaccccaggacatcattttttaaaaaataaatgtacgactgagttttaataagatgcccattttaattgagagcttttcactccacagaaactgcaaagttgcctctcagaaaaaaaaaaatattttcatttgagacatttattttcaatattttaacacaaacattagcagatatgaaaaatgcttctaaatgtttagtgaattcaatagctcaatactttcatgttttgacaatgtcttaaaagagaaaagaaaatgaaaatgacagtttatatttgctgatgttacttagagataagaatgttcctttttcttttctttctcattgacctaaaaatttatcttccagatttaaattcctaagaattatttttgcatttttcaaaggagatgcatgccatcccttgttcagtcttgctttaaggtgccaataatttctttctgcgaactctgcccaggtatgtgctcatgctttcattcacctcgaatttagtatatcccaaatgtaagctcgtagccacttttttatacttaatggtctatccttggtgcccagaaatgcctagctagcaattaagagtagacacttggtagaagttttagtgaatattaatgcattctacctctttttgtttgttttagtattcttcttatcttcatatgcacatacttcattatcctgggtaataaattaacaatatccacagtccatgctattggacctatcttgcattagtctatgtattagttttaaattcttattcacctcttccagcttccagtgaatgccagcattacctaatttatgactgtgtcacttttgtctctgtctcagtgatcaccttacctactcctgtctgtatgaagattcactttgtcttcctcttataaaggcacatataattgcatttagtgcctatctggctaatctgcaataatctttccatctcactatccttaattaatcacgtattttgccatataaatccacgtttacagagttcatggatcagggcacatttttcagcctaccatagtctgtttctataggacttgggccaaacttctaattaaagattactgtacaattagatgagtaagtaatatttttaataatgatatgcacaaataaaataatgtttcagaacttttttctggtagtatgagggttttgtttttgtttttaattcctaaaactgcggatttgcctttcccctttactaacaaaatattatacttaggaatatgagtgattggaacattttgagtgaaattctaatgtgaattctttctttatgtttccaacacaacattaagcacaaaataattctgcaattattttacttattgcaaaatatatttaatgcatggcgactgatggggaatgtcacccctaactactgaatatgttaccaaaactctgtttcttcttttatgctgaggaagaatgaataatgtataaagatgcaggtaagagacctgagacgtttttaatatggttaaaactttggctgtgtaatattcaagtagctatttttggcggtgttttagaaagtaatgcaaatgtacagacaaggcaaggatagagaagccaaacgtggatttggagagcagaacttacttcatacttcaaaggcctgggagttgctgtgcattttttagcaaagagaatgtttggagaggcaggttgacaggcgtgtacaaagatagccacaaaactacttaatgcccaccgtctgtggataatctggagcagttccgaaatactggtctatggaccagtccagatactcagactcttctaggtctgtggggaaatggcaaatactctatgagaaaagtgagtgtaaactcacttatactcatcaaagtaataaatgtcttcaaagagctaaagtttgaagtttaaagtaaatcttctataaagatattaaatcctttctaattttggatggcaaatggtaattttttatgagataatggtgagagcatttaccatagggctatacaaaggatgttcatacagctactagaggtatttaagctcatgggaaatacaatggacccacaattgtactagacattgtcagctgtggccacatcatattcatttttccctttcctaaggacaccctgatctccttttaacaaatatgtttctttgtatatagatttagcagaatgataaatttagatactcatgttcaactctaagagcctttggtacaagatctcttctcatccgagtacaaactatgaagcagatgcatgacaattggagatttatttatttattttttattattattattttggaagtatcctggttggatgtttgctgctgtggtttctgctccttggcttgctagaagctctcccttccactccactccctaagcccagttttccttctagtatataaccttttttttttttttttttttttttttttttttttgcgagagagtctcactctgtcccccaggctggagtgcagtggagtgatctcggctcactgcaacctctgcctctcgggttcaagctattctcctgcctcagtctcccaagtagctgggactacaggcacgccaccacaccacacctggctagtttttctaattttagtacagacggggtttcaccatattgatcaggctggtctcgaactcctgacctcaggtgattcgcccacctaggcctcccaaagtgctggaattataggtgtgagccaccatgcctggtcaacaacttatttaatttatccagatttttctttaattgcagtcatactataaactagctgatatgtttaccaaatacctatgcaaacttgaaagtaattgcatcttttctagagctaataataaaacctgcttcagagagtcaagaacattacatgagtcattatatataaagtacttagcaggtagttagctattttcctatcatcgttgttactgccatataagttgcacaatcccaagccaaaaaagacattaaaaagcatgagtgccttccctatgactatcagatattcttataaaagccaatagagttaaaggataaaagcctaacgctttaccctcgtatgtccaacagccacctttaaaatcaatttccaagcataaggcatgaccttggcttggaaataaattgaattaatttgcagtacctgcttctaagccttgctttttaatgctgactctcactcacccaatatcttcagcagtttagcttttttcaaaatccccacataattcattcaaatgaaattctccaggacatcaaaattgttcaatttagtggactttcttgacagtgggttctccgtaacaaagtgctttctttctcaaactgcatagaaatcagggaaaataacatcttagttcccctcctcaatccaggaactaaaccaggcaaaaatagagaaagcagtgtaagcagctgcttactcagactgaatatatgatggaatttattaataacctgattaaacaatcaatcaatctgctctgatgatctcttgtccctgggtaataaattaccaaattaaagcagaagaaaatgtgaatgcaatctaaaaagcaacaaaatattatttcactcactttatagttttttgccctttaatctcatgcttcttttcatgtggtgtttgattccagtgggcaatttgaatatgtggatgggtttcttttcccataaagtaattagggtgtctcagatagtaagccagactgaagagcgcatactaattaaaggcttctgctttcacttacgaagagccaaccttaaattttttcttcttctcctccctaaggtgcaaaatgcacataattgagaatgtttcttacagaaactagagaaagcacttgtgcaagaattttactacatagagctcactgaacctggcccatctagcacttttatggctcatctacaaggaatggaagtcacatgggcactcacagtgctcaactgttacacttgtacctaggataagactgctcaagatagtagtacttttgcccagcagcctaagcacgatgcctgtaaatacagacagacatagttttggattattattttaccttgcctttatgtcttcagatttttttcagaaaagagaccttttcattacacacagagatcaatagcttatattcacaaataatctggttgtgatgtctcagaatcaagctgtttgcttgcacatttccttgaaaactggcaagttttgggatgagaggaagagaggtggccctattaacaaaataaagattaaaaaaataagaaaaggaaaaagaaactgtactaattactagtctgtcctactttccttactgcttttggcttcacgtctacatggattttacttaagaacacggagtgaaataggtctggctgtttcccaggctagcacctttagctagcacagcctttttgtcaggtctaagaagacatagagattacatcactttggagacatttagcttgagttgaaaggtttacggatagctttcacctttctgcatgaagattctgcagtgctattttctacaatatgataaacgtggtcgtcattcattcatttattatggaattagtaccttataaaagtgtccctggcaagttagctagctccttctaccatatgagtaccagtgacaaactgccatttataaaccagagagtgagccctcaccagacaccaaatcagccagtgtcttaatcttggaattcccagcctccagaactgtgagaaataaatttctattgtttgtaaattactcttttttggcaaattgttagagcacctcaaatgaactcagacaggtgtaagcactgagagacagagatcattgtaatccgtgtcagaatctgattatttcactaccaaatattagaaattctattttcttttgtgtcctgggcaatatgcaactcatattgttttaactgtctagtgactcctcaatcatcccctcaaaagtcttttcaacatcactttaattatttgacttgtcctttttcactctgtattctcttaaactacatctgtataatcatttcttacagttccaattactttctctatggtgataaatctcaaatctacatctctaacccaaatttcttaactgagttctagatactgtatatgatgaatcaattaaacctgatattcttttccattacccacagagacctccatcccatcatatccaaaagtgagatcaccatggtcacactcctcctccaatattttcagtcctggaccatcgaagttagaaacctgggagtcctttgagatcccttcatcactccacactgcttagagccctttgattttggctccaaacatatctgtccaattaatcacttctgttcttagactactcattgtatttccttgttcccatgcacattttaaaggaattaatgcaagagtcttggcactcttctgtttgttactctcaaaatgttagcagatatatattaacagcagggttggctgcaaactttgtaggcccttggcaaaatgaaaattagggacccttgttcaaaagttggcaagaagctctatgaactatactaaacatacatttcttttcttccatagtctctcttctctctgtctctctctctttctctctcactctcctccttaatgatgatttttatttttatttttatttgtcatttaatgtcatactccctacagcacgggaatatttgcggggtgagtgaagaacctcacaggcaccgaggttcggccccgtgattcttcatatagcatgtgcacagcccaccggtatctgatttctcctcctagtacctgacagatatgccctggtggagttgagaaaggcaatctccctcccatggatctcatgctcatcacttatcagaccagtgactaccaaggaatagggatatactaacaatggccatatgctttcgcttttccttttcctttaccagttgtagagttttactggattaaaaacctgtttattggctggtcacagtggcttacgcctgtaatctcagcactttgggaggccgaggtgagtgatcacaaggtcagtagaccaagaccatcctggccaacatggtgaaaccccgtctctgctaaaaatacaaaaattagctaggtgtggtgacatgtgcctgtaattccagctactcgggcagctgagtcagaagattcacttgaaccagggagtcaaagtttgcagtgagccaagatcgcaccactgcaccccagcctggaaacagagggagattccttctcaaaaagaaagaaaaaaaaactttgtattaattcgttttactccttagtagcttcaaaattatacattatttgccattcttctcttgacttctcttaaaatttatatataagcacacaaatatatacacacaggtatgtttttctaactattcccaaccttgaaaccaaacaaaacccttaattgattttcacctaccatttccaccttttccttccatatttcttaaatttgagtaccacttttcctctaaattctcttttcttctaattttggaaatgattttttgttcttttggagtgaatcgtccatttttttccagataaatgttttgagccattacatgcctgaaaaatgcactcattcccctgtctaatgtgaatgatcatatatctagataacaccctatctttgcagacactgttttgttttctctcattctatgttgttgcaggtaagaaatgtaaggctgtctgagttgcatttcattgtaaatagaatgttcttttttaggttagttttttcttttaaactttaaagattatttatattataattgaggttcaaaaattccaccagatttaagttcagatgtgaatgttttactttttttgctcaacccctggcagacttattcaatctgaaaactcaggtctttaccaagatgccaggatatcatgtgttcttaagttatagaataagtatgaatcttttctaaagatgtcagtaggtgtctcattggttgtaactaaaatcttcacagcctcacccccctttaatgccttcaaaaaatccttcataatcattgctcatcgggtacatgtaagcatattgtgctatgaagccaatgacaatccttacttatggctattaatttctatcaaactcctccctgtgggagtaaccaaacccctcgctcaaaaccctctttctgtgtaggacatagctcagagaataaccagtcagtgatcatccagtggcatactgctcattaatgaatttgacacaatttatcaatgactcactttgtacaagcctctggttgggcaagaattttatgtaaatgaacaggttgaatccacatggtatgaagaaatcaaggccactttaagactgtgtcactaaaatcttatggagcattttgtttctctcttgttctacgtatattaagtcatcacctgaccttattgtttacctgggttttattttttccagccggtcgtgccatcattgatctgctctcattataggaacacctctatctgtatctatttcttgttttgtgtgtgtttactgctccttgggagatttctgagtgctggagtcattggctccggctgcataaattggtgagctgaagttgcagatttggagctgtctcagccgcactctcagggttataaatgatgctgtctgactggaggacactgcattaatgggcattatggataggcctgttctatttcagaaccatgattttcaagccaatcgcttgtatctgagacaggggacattgtagaaggctgtggtagaggaaaaggcttaatccgttttttagaagaaaaataaacttaaaataacatatgaagtgaccagatatgttagaaattgaagagagtcaaggcatgctgctgaaaaaacatcaaactattttcttttaccaaatagtctatgaaacctcaaagtttcattttactttatgtaatacctttttaaaaatcttaaagctgcaagtacattatgtccaattctttctcttttgagggaataaaatggaggtgcactgtgtatgataaggttaaagtaattttaaagctaaagagaaagaagggaaagtatgctggagcagacaaagatgcagaagaaaagacgagatagatggttgactctggttcactataagtcagggaagttgctgttaagaggttgctattaggagggtaatgaagaggtttatggaagtgactttacaggttaatgcccttgatgtacttgctttattattttgtttactctcatttcttcaaggtaaaattatgaggattaaaatacatctcaggaagatctataatacctatatcgaaaactgagggaggaatattaagtgaaaaagcttaagacttggagcttaggacatcagggctgtttactctcctgacactgaatgtgatcttaattatgttatttaacccttctagactagatattcctcttctgaaaggaatgtgacaatagttctcttacactgatgttgaagcactaatacaatgatgtattttagtaccaatcgcagaacctgacacattacaagtgatgaataaatacctgctttttcttttgttctatccttcctgttagatcacttcccattagttctgcctgccgttggtttcatttttcaaatatatgttttatgcagggtggtttgttttgttttgcttccagtccagtgttcatagttagcacttgagattcgtagtatttgtcatcgaaattctctgtttcctcttgaatgttgagataattgagtaaatcacaatacaagttaggtcttataaaccagtgcagcattcattaattcagccattacaatgtgactgaagggtcattttcacactgagaattttgaaggtaccactgctaagactaaaataatttgggaaagaggaccattttaagctaatggcattcagtcatgttctcaatttagagaccttcttcaaagtattagctacaagctacagaagatagcaaatcaacctgatttcagatcatttaatacaagaaaaaaaatgagcaagaagctttatgtcattgtaattttcactgtttaagtcaagaaggataaagatagaagatcagagacttaaaatctaacctaatcagtgaagttcctcctggctaaagaaccggagggttattgttaaaatccttaaggaaggagcaataagatttcaaggttaagctttttagacaataaacacttaaacattaagaacatcagggcatgatcagttccccaaagggctgacacaggttcctgaaattgatctcacttctaatttctttcttgtgtcttgggagtagagtgtggttatgaaatgatgaagcctccttatgcaaatcacaggtgcctggggtcaactccagtccttaccatggaattacagtcaatacgccatgtcagcatgtcactaaggcaatgtaatgtttaacaaacaaatagtaagaacaatttgagttaaatgtttttctctcttagcgtctggatggcaaaatctgatgtgtagaacaagcctctttactagggcttgtgctatatcctctctgctgattggaagatacagcaaaagattttaatttatgaataagtttttgtagcaaaattatctggtggcattatggaaaaagcagcaacagattgcttctgtaaggtattgggtgatcacgtggtccgttgatatctgccacagaggactaatgtctgaccacgacgccaagagcaagtgaggtgagacttcattggctcttcatgggctttcctgcttaggatttcatccaccactgtctagcttacccccaaacgtactttaacttctctcaagtgttcccattgacaggcgcatagggtgactttatcttgacatatattaaaagcacagcaatacctagcagatgttccataaacagtatttatggaagtcgtatatctccacggtgatcacaccatgcaatgtgtagcacagctgcaattagggagatctatgataggtgcattgttttatgaggtgtcatctgggtcctgagcaggaaaatcataagcccataatgtttagatgttcactttttaatacatatgatttattcaccaagacaagtaagctcaacaagtatctattctttggtgcattttttttctttattcagtctttcttttcttccttttttctcttcatgaatgccttttatttatgtattttactttttcattgcatttacctagaagttgtgtgtactttaagccaagtagatagtggtaatagtaaaagaaaaaaagcacaaattatttgtgaggcacaatgctaagtgcaatgaggaatatagttatagtaacaaagtccttattctcaaggaagttatcctagttaaacatgcgaatttgtacacacacatatatagagccacataatggtggcaatacgtatcaagggatactatggaagcttagacagaaaaatttcactgcctcccttacacaaaaaagtttacataagcaaacaagtgacagttgaattaggccttgaagagtggctaaagttttacagagagaaataaaggataagaattcaaaacagatggaataaaatagaatactgggagttggggagtggatctccaaatttgaaagtatttttaaggaattgttactagaggttggtgatattattagtagcaaaatcaaactaaataaaaaccaaaatggaaaaatcagcgggcggtaaatgatttgggggtatagtgataaatagtctatatacatattgatgtttttagaacagaaatgaaaattcagaactagagtagaggataaatattggagacatagacacaaaatgttgatatccggaaagaagaactaatgttttgggaagataggaagatataactttataacctcatacagaacctttaggagagagtaggtataaatcatatagagtggtgagaagaggagtaagtcaggatgttgagaatgcaaacttgttagaagtgagagaaagcaagcaagtggaaagttgagttagtgaaaaattatgaaagtcaatgacaaagggatcattatgtcagatgctgcagaatcaaagaagaggacttagaaaggactgacatgtataattagacagagtggagcacagggtttaattatgcatatattgggtttgtacccttggtttccacactagttgtgtgatctcaggcaagtcacttagcctctctggttctccactatcttaattataaaatagagttgtcattgggagtaaatatggaaaataatttgaaaatacttggtaaacagtaagcattatacatatatttttatcttctttctctttctgcaaattatctttcttactcccatttgtgcaacgtgcgtgaaggctgatctaaatggtggtcccaggtcctgagtccacatgacctttcagctcaaggacacccaacactgatcaactctgcttctatagtattttgttttgctttttttccccctcctaatttccttcaaaaagaacctaattggcacaaccatgttatgtttcttccccaaggccactcagccttgaccaggcatcagggtcaggtggcaataaactctgcttctttagagatgtgggaagtgcagactgtctagagttggaatgttagtggggtccgattgtcatttctttttttttctttcctttcctttcctttcttctcttctcattctttcttttctctttctttttctttctttctttctttctttctttctttctttcttttctttctttctttcttttctttcttttttctttctttctctttctttctttttctttctctctctctcttccttcctttctctctctctcttccttcctttctctctctcttccttccttcctttcttttctttctttctttctttctttctttctttctttctttctttctttctttctttctttctttcttttctttcttctttctttctttctttttctctctctctctcccttcctttctttctctctcttacttttggggggatctcactctgtcacccaggctggagtgcagtggcatgatcttggctcactgcaacctctgcctcctgagttcaagcaattctcctgcctcagcctccccagtagctaggactacaggcatgtgccaccatgccctactaattttttatttttttattgtagtagagacagtgtttcaccatgttggccaggctggtctcaaactcctgacctcataatccccctctttggcccccaaagtgccgggattacaggcatgagccaccgccactggcctgattgccatttttttttgtgtgccaagggaatagatgaatgctcaaaaggatcaaatgtaaattctgggttcaggctgccaccttctgtttatgtcctcttagtagacaggatgggtatttgtgaatagtcaaatggtagcttacagctctagtcaagcacatggctttattcaccaaaacgtaatggagatggagcaagtggtaggacatcacttgatacccattccatcctctgacgtctctgccatcaatcattattgtgagattgctagactcttcagtctgaggacagaatctaaattcaggcagtactctgttccaagacagactctttcacttattctaagtgactttggttgggttccttagtatgtgtgcctcagtttatttgcatatgaaataggaacatattaaccagctcacagatctgttatgcctagcacagtatgaaatttagtagatgtccaataaatgctctatcttcttgaatagtgaacacagataaacacatctagtatatgagacagtgtaaaacagaagaaattatgctttaataaaagttcttattctagagttcttatcctctctctgtaattctaattccagagttttattttctctctatactttccccagctgtgcaatgtttgaatatcaatttttctttgaaattcaaaacttttgtgtacaaacagaaatattctttaccactataaatattttactaggttatcagaagctcaagtgagctaaggtatagaaaacactttacaaattagaaaacactaaatgcaaagtatcactaaaatcttacttcagttattactcttgaataactagaatttttttttttttttttttttttgagacggagtctcactctgtcgcccaggccggactgcagactgcagtggcgcaatctcggctcactgcaagctccgcttcccgggttcacgccattctcctgcctcagcctcccgagtagctgggactacaggcgcccgccaccgcgcccggctaattttttgtatttttagtagagacggggtttcaccttgttagccaggatggtctcgatctcctgacctcatgatccacccgcctcggcctcccaaagtgctgggattacaggcgtgagccaccgcgcccggccgaataactagaattttaaaatgcagtccatatagatttcatttgtaaaaacaccattaaagtagattctgggataaaatgtgtttatcttatctcctaaacagagatttttttttttatgcttcgggcaaaataacgatgaacagatgggcttgggtttgctgtatactgtttaaaaaataatgttaaaaatgtttttaaaacatgtttaaaatgggagattttattttttaataaaacctatacttgaaatttttcttcagaagtaacagggatattttataatactgagatagcatttagcttggccaatggtctgttatagctaattagcagctgcctactttcaacagtgcttccacactctggtttgccacagtttctactaattgttattaccccacacactgaagctgagtgtcacatctcagaattgtattaaataatattccagttgagaataagaataaaagtgggggaaaggcatatctttatcttaagattgactttttgtttaagaatagaatagaaatttatggaatcagtggatcttgtgaatccccccatccagatgtttgtcgggccatagggctggcaaatttatttagctttgagaaatgtgaggtgacaggatagctttttaaactctcagaagttctcagatgaagcaaaaggatatgaatctgccatacaaagtggggttgttgtattgattttcttccactcttgtgcaccttatccttctgcaacactttagtgacttaaatttaggatattaaatggcggttactgaataatcccctgacatatcaatccttacttcacttatataaaggcacaggggagctcaaagtgaacagaagcaaaaatggaaataggagacgaagtttgcattaggatgatgtgtcatgttgctttctgcttactttgattatgatatgtcaggaaggcttactaagactatggaaaatataaggttttaaaaaatgatttaaaaattttaaagttttagttataagttaaacctgggaaacaaatttcttctggtatattacatgtgaatcaatatacacgcttttacgtgcatatgtctctatggaaaaaattgaaagatataattaagggaatattctccacagatgttttacttatcatttctccttttatatctctgacctgtttcacttctgatttaagccttcatgtcaagattttccctttgggaggtttacaaatgatgacccagtaatattaagatagttaatcagaagcctgccttccaaatacagtaaaagtgtaatcaactagagaaatactattgagattcacaatctgcccccactgtcctttgacagatgtgatatcttattgttcaattttgcaacactgtatatgtttcatttattttttgccaagttaaaaggaattaaaatttaattttatgttgaaaattattttggaaattcaaaacaacttgaggtaactggaaatgctcttggggccagaggctggaggtggaaaacaggcagagagttcaaaaacaaggatgaaatgcacggtgtcagattcaggagcgctttcttaagcatactaactccttcctgaggtggaccaaacttctgcacatcaaatagatactattctcagactccttgggaataataaaagcagagcctacaaagttactgtaggtagaatcagagatgcatgctactgtatacaccattcctcaatcaaagaaaaatcacataagaacaatacatcagatagcactccttttattacaatctgcactttcttttcacctatgctggagcgtcaagtgagtgaagttggagatatttagttatttaacaaataaataagcctatatctattagacaatatcgaatagagaaacatatctcttaattaatttaagcaagttttattcagagactgttatagttcagatttggtgcttagtactaggaacaacgttgatgaataaaatagataaattacctgtctttgtaagtcttgcagcttaatggcctgggcctacagagacgttgacagcagggaagagaggaagcagaatgccagtctataattgctcacctagatctgaactagagccaaaagcagaagaggctaccagcagaaagaaaaaagggaattggaaggatgcagcaggaaagtctattgttcaaccctattcagttttactctttcggggtacagggcaaggacattttttccagtctccttgcagctaagtggagcagcatgcttggttagaatcaatgggctgtgggaagaaatgggtatgtcactcccaagtcaaagcatgtaacatccatagctgacatagcatgactctgtggttgactcttccctgcctcaccaacctaagagaactgtgggtaaaacagtggaactgtcagaatgaagtagtctgaattgttgagtagctacatggaagacagtttcctggacagttgtcttgatttgtgatggactctgtgtgacaaagaaacacttttgttgtattaaggagagatggtagggttcttgtatcataacctatcatgccctggtcatagaggggttattgatcatgtgtttcttgacagtagatatgaggtgctgaaaaaaagggattgagactagagaagaatttttgccctcttgaagccaataagtggaattatagaaatccctcttgatttacaggaaagtgtatctaaaccaatttcagtttgttttccaaatgagaaacagattggaaaattacttagagtgcaactgttcttaagatgaagaaatgaaatattctctatgatcaaaaggaggatataaatacactaagtctggaagagtttttgtttgctctaagtgttaccatcttgtcatattaataattttaattttattcatatgaaatattcaagtacaatgttttgtgtttgtatgtgtgtgtatatatgtatgtgtgtaatacaaaactcacttaattttattcagttccaccagggaaattccaatgtaatttgtcaactttataataaaatgggttttaggtggatgggctcagatctctgacttacggagaaaaagaaataatcattttttgctttgcttcaaagactggaaacaaataaaaaacatgcaaaatttacaagacataagatcagtaatttactttacaaaaattggtttttgactcagtagtggaaaaaattacttatttgtgtcacggtcacttagcagctattagtacctagttattttggcattgaaaaaccatttatttattaattcaatcattcattcagtaaatacatattgagtagttactatataccagtcaacactggaatttctgaaaatttgtctgagaacaatgcaggcatggtccatgatctcttaaagcatacattctactggggggagacagaatataactaatacgtcaaaaagaaaatatcaagcagtgatgcatactataaagaaaagatataaggatgaggatttgagtgtctagaggcatcttcagatagagtggtcatgaaggcctttttgaagagatacttttaaaacagaaactttaatgacaatagggagacacccttgcaaagacctggagaagcttgatactcctggcagagaaaatcataactacaagggaccttatgtgggagtacttggcatagacaagggacagaaagaagacctgctccagcacagtgaatgtcatggcacaagataggaggtttctcattacatagcacctcatattagaaagtaaagtttgaatttcactctcaatgcggtgagaaatcactgagatattttaagcaggaggtgaaatgattggaattaatttcatttttaacttactgataactttgcacagaatgaaaaaaattgttaagaatggaagtctgaagatcagtaaaggggattattgtagtagtccaagagatagagtagaagggttgggaatggagggaaatgacacattcaaaatatatttgggaagtaaaatcaattaagatttaataatgaactggaactaggggttaagaggggactcaagattcatctattgattgttggtttaagcaacacagtgaatagtatttatttatttactgatacagagattacagagaaaggtaaaagtttccattgagaaagtagtaaaggtagggggatgatagagttttgtttcaatgatgttcaatttgaaacgtcaattcaacatttgagaaaagattgaaatgcctttgcaaaactatcacagtaaaagaagtctgacatggctgacttcatcttgcttctaccctctaagctatcttcacccattcctggttgtaggtcacatgggaggaatttggattataatttgaccttgaagcagggaaaatatagtccttgataaaactgattccctccttgttcacagactgaaattggctttgtaaaaccaatgaaaggccatgagaatagaattatgagaggaccctgaattctgctaaaatctagacatagtttctataatcctttactgcccaggagtcacgtgcccagaggtcataagatttgtgacttcctcaattgctcctgtagataccatcacattgtaacaccttgggtgttttttttttttttgaaattttttcagactgatctcacccatactcctgattcatgacttaaccagtcctgtggccccacccagaggcacactcaatgtatgaggaccatttggaccatttttcacacccctatcatttctttcccaaccaatctggagcacctattccctagcctcctccccaccaaattgtccatgaaaaccctagccactgaacctttgtggatattgatctgagtaataactccatctcccatgtggccagccttgtgtcaattaaactctttctctagtgcaatgtcatggtctcaataaattgattcagtctagtcagtgggcaggaagaacctatcaggtgattacaagatgataaattggcaattagatacacaaatctgaaattaagggagaaaatcatgcttgaagaaaaaaattgaggagtcaattaaaatatatgtaaaataatggagctagatggtacttcctagggaatgagtgtgctttcggtaagattttatgtaagaaataataataaaaaacctacattgagctgtatgaagcatctaaatttaaaagactgagaaagaccagcaataaggatggagaaaaccagacaaatctatattttaaaaggttagacagagtattctggattaatggtatcagttgctattgagaggtcatgtaaaaagaaaggagagaaatgacgacaggatttggcaccattgaggttattagtgaccttgccaagagcaactatcaaaggattataggaacagaggcctaaagtatgtgcactggggaaagaatagagattggcacgagaaagtaaagaccgtgaccataaacaactcttttatggaaaagtgtcatgaagccaaagtgaaaaatggtactgtagctaaaggggcaatatgaggtcaagggaaacttctgttatgtttaaaatagaaatttctgaggcatgttttgatgcttatgagagcaatccaaaagaaaaggagaaacgaatgactctagagaaagacaggatgattataggtgaaaaatccttgagacagggagaggtattagaattcagagcctaagttaatctaggatgagagtaggtatacttaatcagattgtttctattttctcaaagaagtgtgaggcaacaccctcagcatagcataagcaagaaggaaggtgtttgaagtccgtggagtgaggaaatggcttacagtagtaacccatttgagtcgaagttcaatataccagaatgttttgtaatttttttttttttttgagatggagtctcgctctgtcgcccaggctggagtgcccttacgcgatctccactcactgcaagcttcgcctcccgggttcatgccattctcctgcctcagcctcccgagtagctgggactacaggcacctgccaccacacccggctaattttttgtattttaagtcgagacggggcttcaccatgttagccaggatggtctggatctcctgaccttgtgatcctcctgcctcagcctctcaaagtgctcctgattttaaaactaaagcaaaaagcacagttgcattttcctccaacgaagaacagctgttcagttgagataaatgaacagagtagagagatagctggatttaatgcacagtcagttgagaacagtagagaaaaagagaaggaaattaagacattagagtaaacttaatgatgagctattgacttttgctggactagtaagggaaattagaatatgagaaaaatgatagttaataaaaatgatcagggccaatggatttggagatcttgttgagattaaaacaatgctagagaataatgactggaaagagtagtagaaaatgccgattgctaatatctgtttatttccctaaacccatttaaaaattaaaaacaagaacaaagagttgacagggcacatgaccacatggaaagaagacattttacagcaacaacgttcataaattctagctaatgtggatgtgagtgaaagtatcgtgcaacttttgggaagctttcttaaagacgtgatggctggagcataagcaaccattctggagcgtggaagctttgtgttaatggtaacagaggtccaatgtaaaaagaatctgaaggcctgatgcttttgggatgctccctaaccagtgtctgcttctttgaacttattttacatgagagcttctgttaggtttaattcagattttcatttgtttggttggtttttcatttgttgttatatacatccatattcaatgctaaataatacagaagaatgagatgtttccagatagtaatattcaagtttaacatttttgaagtgatacaattattgataaatgtaaaggtcaaaattataaccataaaatggaagaaaacatatcactgagcatgaaaaggtcatggaagtgacaggctttttagcccaggtatgaggaagataattccagtagatgaggaaatcacagacttagaatttaagcagagagggcaaaataataaactaggtgctaaaatcatcaatgaatgatggaaaatgagccagaatttgtagagggcaaaaagagaggtggtaggtgactgagagaaaagtggtttattgaaaaaaaaaaaaatggggagctagaaaagaaaagtttctacagggtgcttcccatttgaaggaagaggtatttggttcaagctgtaaagtcagaatgcagagctacaatattgattaccactttcgagttaagaacattagcaaaagccaggcacggtggctcacgcctgtaatcccaacacattgggaggccgaggtgggcagatcacctgaggtcaggagattaggaccatcctggctaacacggtgaaaccctgtctctactaaaatacaaaaaattagccgggcgtggtggcgggcacctgcagtcccaggtactcgggaggctgaggcaggggaatggtgtgaacgcgggaggcggagcttgcagtgagccgagatctagatggcgccactgcactccagcctgggtgacagagcaatactccgtttcaaaaataaaataaaataaaataaaaaccttagtcaagtcatttaacctatctatgcttcagttttatcattggtaaaatgcagacaatattttgtaaaaacaagattgtttaagaattaaatgagataattcatgtgaagttgttagtatattatcttacaaatttttaacacacagcatgttagctgtggttttggttgttctgctcaaaacataccaattacataccaattctaaaatataacacaatagatgaatgcttagctcttagtctttaagtttctaaatggggtcagttgcttaatacacctcatctcaatgaggagcagtgttgtagacacacaatgtgctactttggaccccttccttgctatttctaatggagtgtcttatttaattagtgaaaatagagaaatgtctgagcatacgccatcccattttagactctttatctgttagagacttaacaacatgtgtttcctcctcttgctctcacttccatgaaaaacacaaacatcagtgtaggcctgggttaagcctggagacttgggtgtactcctggggtctgggtcctaatgtactcgatgggattaatccaggctgcagttttcttgtctttctttctttttttttttttgagatggagtttcattcttgttgcccaggctggagtgcaatggagcaatcttggctcaccggctgcagttttctggaaaaaatcactgataagtatctgctctcaaaatccaacaatcccccagggcagatgccaaagtgaatacagggagtatcaagaagccaagaaggctgcgcacggtggctcatgcctgtaatcccagctttttgagaggctgaggcaggtggatcatctgtggtcaggagttcgagaccagcctggccaacatggcaaatccccgtctctactaaaaatacaaaaattggctagccatggtggtgcacacctgtaatcccagctactcgggaggctgagggagggagaattgcttgaactcgggagacggaggctgcagtgagcccagatagtgccactgtactccaacctgggtgacagagtaaggcttcatctcaaaacaaaaaaaataaaataaataaataaacaagaagttcttctaacacaatctatttaataacaaagctcttacttagctataacagatacttatggctatcttcgattgttttaaaatttttggggaaagtgatttatcacttgaaatgttcactatacaagaatccccacagaggaagaggcttacagggtttggacattcagaggtgagaaatgatgagtctctcaaaacatgaaagggaaaaagagatacacaatcagcagtaaaagaaaactctacaatgtggaaccagaaaaaaaaaattctgtgataaagttctcaaatgtaaatgacagtctacaaagactgaactttactgtaataaaattaaaaaacaaaacaaaccaatgagccaggaatgccaagacagatcacagataggaaatgaacatttacaaatgtttgacataaccttgctgaagggggtggggaggaaaagacaaactaaataactttggaaaagtgtttgactagatatttaaaggttaataataaaagtaactttctctagttggaaaatttgtttcccacagttagcaattctgaaactactttaaatgtatataagtttaaataaataagtaaataagttatacagaagagccaggtttctcactgtaagagaactaaattattaaatgaagaagggtggaaatgacaatgaaactttgtggtggctgtaatacaattggagatagcagtatgaacaatcatgtaaagaaataaagatttgtgtatatacatgggttagtagcgatgcacttatttttgacctctgtctactgaaaggccctaaaaacaatgatacctcagtagtaacaagcatattcagcaacttaattctggcttctaaatattatttctctgagaacaggaacttagactttttggagaaatggctgattctagagttgagacagggaaaatacaagatgaatctgtcatatcttttaattccagaaagtgaacaactgggaaaaaaaaaatgagtacttactaaaaggtgcagaacccaacctgaaagagcacccaaagtctaaagttggaacaatttgagcaacaagataagtaacagtaatgttggattattaaccaaagaataaaaaaaaatcacaagatcatactcatagaattaaataattaaagaaagaaagaaatggggcagggaggagaaaggacaaatctcccataaagaagaagaattttaaataataaaagtagaaagaataagagaaaagaaaatcaccattgtaacaacagttctaactgtggctgaatttaatgagtgactcttgaaggaaaataggatggttacaaagcctctaagcatatctctctctctcaagatattaattacttcgaggtttttaacatgcttacaaattcttgatattccttctttcagaagtaacagagtaattatgattctcttaagtgtggactagacataatgactcacttttaacacacagaatatgaaaagattataaaagttactttgcaatggaaaaataggaagatactactttccccatatcactaattataaagattaatatcactagtaattggtcatgttggtatcttatatctcctgataaaatgcaatgaaaaggtatttcatctctgtgttattttccagaaatattcataatttcagtctaatcataaaaaatcagataaactcaaattgagagttattgtataatatgtgtgcacagtgcttttctaacatgacactaaaaataaagacaaactgaaaaactattataaattgcaggagaaaaggagacattgttactaaatgtaacatggtatcctgaattggaggctggaacaaaaaaaacgatatcactggaaatactagtaaaatccaaataaggtctgaagcttaattaataaaaataaaccccaatgttaattttttactttttctaaaactatcaagattatgtacattgttagtattagaggacgctggggtaagggcatatggacattctctgcactatcttttcaactctacaataaaattaaaattgtatatataaatattttatgagtaagatatatcttttgtctaggcacaatatgacataaagatgttggagatttgaatctgtggccattcaccatgttggttattttattatgtcttgggccattttcaaatttggtttagtgattaagagtttggaccctggagttagactaatgagttgtgtaaccatgcatacataactaatttctccaaaactcagagaataatgatagtaacaataataatacctaactcatacaattatggtaaggaagcaatgagactgtacctataaatcaactagtaccgtaacttttttttttttttttgacacagtctcgctctgtggcccaggctggagtgcagtggcatgatctcggctcactgcaagctccacctcccaggttcacgccgttctcctgcctcagcctcccaggtagctgagactacaggcgccctccaccacgctcggctaattttttttgtatttttagtagagacgggatttcaccgtgttggccaggatggtctccatctcccgacctcgtgatccacccacctcgtcctcccaaagtgctgggattacaagcgtgagccaccgcgcccggctgtaagttttacatacgaaacatcgaaggcattttagctactatcaatattgttatggctattatcataatacttaccgttgtcaggatttagtagtaaaaccccttaaatacataggacctctatgcttgtttgggtgacactgaaatttagatttcagggaagtaaagaagtcaagaaatgggaaagtgatgatgactttaaatcacagtaagtggtagaacactttcatcaccggggcctgtgtaaaggaagacaaaggtgtgtgtgggtatagaagttgaggtggagcaagaagcactgcctctggtagcaggtgcggcttccgtcatttactgagcaagcatttatcattcattttttgatgtttgctttctattaattaagtaaaagaaaacttattaaatgttcggcgtcttattaggtgcataatagatccgtaaactggtagcggcctcccttccttctactttatcatttttagaaggaaatgtttatgaaagtcttcttatgcatcatgcatggatgttggtgggaaagaggccaagctgaagaagatatagaccttgttaacaagaaagtcatgaacttctgtatgcgaccatactaataagggaaagtacggaaatcaacagatatattccccaccattagagaactaacaatttataaaccagcctgaaaaaagatcagttatttcttattattaacccttttcaaattaaacaaaaaagactagcaattaaacatgtaactttttcaaagtatcctttggggtaaagagaaggcctgggaagatgatttgacatgagctttatttagaaaactatcatcccgggtgttaggtttttattctgtgactacacgtaaatattttataaatataaataaagtttgctaacctggagtttccttacctagtagagtctgcacaaaaatctttttgctgttcggcagtaaagagggagctgccaaaagggtcagattttagactgggtatggtaagtcttaattgagacttccatgtgggaaagctcacagaagaaaggtattatcatgtaaatacagggtcttgaagcctccatgataattcagaatgtatttgccacatgttagtaatggatgaggtgtaccaattttgaaatttaatcaacactaacaattggcattactgataacttactgttaactagcaattcatgatatactttatctgcagtatctcgttgaactctgccaaccacgtttaactttattatctccatttagaatgtgaaaactgagctttgagaggcaaagtgtgagtagactctgctaatatcaattcttcctttcttatttataattggaagcccaaatgattaaggacaataatgtttacagaccaaaaaaaatcactttttttgaattgaacttccttgtgtgggtgacactgcaatttagatttcagggaagtaagaaatcaataaatgggaaagtgatgatgactttaaatcacagtaagtggtagaacactgtcatcactggggcctgtgtaaaggaagacaaaggtgtgtttaggcatgaccatgtcactcatttctacccagtaaggtgtaagcaaaagttgcttggaggggctttcaggaaagcttaaaagaaaaaaggatttggctaatatattttcctcagtttttgccttttaccctttaccattccttttattcttgtctgaaatatggctgtaatgcctgaatatccagcagctacctgatgatcatgagaataatgaccacataataaatattgaggaaaatcaaaataaaagaaacaatttttaaaatcatttatgctttgtttcattggtacttttacataatatatgcatgtactgttacttttataatgtattttaaaaattgtgccaaggttatttaaaggagagttttctttcctttattcttcattggcagattgtgtcttctatggttgagattattttctggttttatgtgattgtgtgtaggaatattgcaccttcccttttatttcttttttatttttactttgttttgtaaatcttcaaagatatttatcgatagcctcttttttgaacatcatataatttacatcaggaaatgataaaaaataggagctcctttgtcatctttctaacaggactgtcaggaaaatcatatttgtgaatttaattttagttcctaatgtgtccatcatttaatttttaacttaagtttttttcacttttattttaggtttaggggttcatgtgcaagtttgttatatagataaattgagcattctgggggtttggtgtgcagattattttgtcctgcaggtaatcagcatagtacccaaaggtggtgtttcagtccttatcctcttcccactctctaccctcgagtaggacctgacatctgttgctcccttctttgtgcccatatgtactaaatgtttagctcccacttataagtgagaatatgtaatatttggttttctgtttctgtattagtttgcttagtataatggcctccagctccatccatgttgctgcaaagaacatgatctcattcttttttatagctgcatagtattccatggtgcatatgtaacacaattcctttatccagtctactattgatggcatttaggtttattccatgtctttcctatcgtgaagagtgctacgaacatacaaatgcccatgtctctatggtagaacaattaatatttctttaagtatatacccaataatagaattgctgggttaaatggcaatttctgttttaagttctttgagaaatcacaaaaccactttccacaatggctgaactaatttacattgccaccagcagtgtataaccattctttttttctctacaaccttgccagcatttgttagtttttgacttttaaataatagccattctgactaatgtgagatggtatctgttttagtccgttctgacactgctataaaggaatacctgagactgggtaacatatgaagaaaagagatttaattgactcacaattccacaggctatacaagaagcatgcctgggaggcctcaggacttttaaaatcatggtggaagatgaaggtgaagcaagcacatcttatcatggtggagcaggagagagagaatgaaggagtcgtgctacacactcttaaacaattagatctcatgagagctcactcactatcatgagaacagcaagaggaaatctgctcccctgatccaatcacctcccaccaggccccacctccaaccctcaggattacaattcaacatgagatttgagctgggacacagagccaaacgacatcagtatttcattttgggtttgatttgcattgctctaatgattagtggtgttgagcatgttttcatatgcttgttggctgcatgtatgtcttcttttgaaaagtgtctgttcaatgtcctttgctcactttttaatggggttgttttttgcttataaatttatttaaattcctatggattctggatatcagaactttgtcagatgcataatttgcaaatattttcttccattctgtagagtgtctactctgttgataatttcttttgctgtgtaaaagtctttaattgaattaagtcccttttgtcaatttttgcttttgttacaattgattttggaatcatcatcatgaaatctttgccaggtcgtatgtacagaatggtatctcttaggttatcttccagagttttcatagttttaggttttacatttaagtctatcatcctttgttaattaatttatatatatatatagtttaaggaaggggtctgaattgattttcatatatagtttaaggaaggggtccagtttcaatcttctgaatatggctagccagtaatttttgcaccaattatttaataggaagtcctttccccattgcttgtttttgtcagatttgtggagatcagatgattttagggggtggcattatttctgggctctctattacatgggtctatgtgtctgtttttataccagtaccatgctgcttttgttactgtagccttgtagtatagtttaaagtttggtaatgtgattcctccagctttggtctttttgcttagaattgccttggctatcagagctcctttttggttccatgtaaattttgaaatatttttttctaaatctgtgaagaatgtaattgataattttataggaatagcattgagtctgtaaattgctttgggacagtattcccattttaacaatgttgattctttcttttcatgaatatgaaatgtttttccctttcttcgtgtcatctctgatttctttgagcagtgttttgtagttctcattgtagagatctttcacctgtctggttagctgttaataaagtacctggttaggtattttattcttttttgtggctattgtgaatgggattgcattcttgctttggctctcagattagatgttggtgtacaggaatgctagtgatttttgtacaatgcttttatatcctgaaactttggggaagttgtttatcagatcaaagagcttttgcacaaagactgactacagaattttctaggtaatagtatcatattgtctacaaacagagatagtttgacttcctctcttcctatttgggtgccttttctttctttcttttgcctgattgctctggctaggacttctagtactatgttgaacaggagtggtgagaaagggtatccagtgttgtgctggttttcaaggggaatgcttccagcttttgcacattcagcatgatgctggctgtgggttttttatagatggctcttattattttgaagtatgttccttcaatgcctatttttttgagggtttttatatgaagggatgttgaattttacatgaagggatgttgaaatccctttctgcagaagctacatttcttgataacattagactgtttacccttgttctttttcttgcatagaacaaataggcatcttatacattaaaacctctgtgcttatagccttataaaatcttgcaaaaatcagatatctagcacatggagatgacaggattagaagccaggcctgtctcactcaaagcccacacaaatactaagctaccttgccaatttagtttgttttgttgttgtgtgctttctcactctattttgaccagtccaacaaatcttaaattattgaagttctaatatgttcagacaattttagaaactctcattatttcacagcatgaatttggtttggaatttcaattatcttaaaacagaatgatttgcatgtacaattcctgattaaaatggcatgagattatcaaatagagaaatagagaatgtttataagcattcaaaaattgattgctacagtctctttcttttctaagaatcaatgtctttgagctattgtgagaaaaaagtttgggactacagtgtcccctaccaaactgggaagaagccaagagaccaaactatgattcagaaaagtctaacttgatgagtagatgaatttattaggacttacatacactcttggataacatcagtacagctgtagagatctgtgccacttcctgtctctaaattgcttttaagctaattttctgtgtctgtctctgtctctttgcctactgtgtttgagtgatgagactgttttccttggtaggttctcatatattttctggaatgtttaggttctcagggaaacctgctcctctattggacaccatggccttggctcactgccaagtcttcagggttcagacagcagacattcacttgtgagtaacctggtgggagacccatcccactacaatccaccctgttccccagctcttatatttttttgccaatcttatgtgagtgtccctcaacagcatacaaggggaagaactatatgtgcctataatgtatacccatggcttttgtgtataggctatacctatatcctatataacagcattaaaagctgaaaataactacaattatgatgcctgttagcaaaacataactccaatgaataggtaaggtgtctaactaatttgagaatgagtcaaagagacctaattggttgtatcatggatctgagttgacaaatgatttaaagcatttatgacattataattttctttatctgggatacaggcacaacaggtagcacctataagggcacatgttgtttgttctccattgagttgcctatcaggcctccaggtggaaaaaatccccagtgagcccaggttgtattttaggtgttgtttatccagttattctagctctgtagagagaatggcagaatattctaaggcataccatcatcatttgttaggggaaggtatctatatatgcaacaatcagactggttgttgactgctgccatatttgcaacccagtccaaaaaaggtgctaccagctgccatgagtaccaggaacaacagcctatgggtataaacacaagtgtttagtgaggaccatcatggatatatttattttagcatcattagcattgaatttgtatccattggccctattaggtggccactgtgggcttgaggcctggcttacagtactagcttccctccatagaagtgggataatagccaattgataagttttgggccttgtccatgctacccgcatgatgatcactcccgctggtattggtactgctgcaagttgatagtgtaaggctcttggatctccatcaataagcacaactggggccgggtgtggtggctcatgcttgtaatcccagcactttgggaggccaaggtgggtggatcacctgaggtcaggagttcaagaccagcttggccaacattgtgaaatctcatctctactaaaaatacaaaaattagctgagtgtggtggggggtgcctgtaatctcagctactcgggaagccgaggcaggagaattgctggatcctgggaggcagaggtttcagtgagctgagattgtgccattgcactccagcccagctgataacagcgagactccatctgaaaaaaaaaaaaaaaaaagaagcacaactgggaccagctgccctctggcaggcttcacggcaccctctggtgcaaccataccatgacagatggtggggctgtacaggtacccttgtggtagcacctggaaagcctattgttggaccttttaagtaaaagcaaactggtcctgttacctttttgctaaaggaaaactggaaaaagcattagccaagactttcacagtatggatattatccaccttaaggatcacctgctctatattttccattaatgatttcagaagtgtcaccaatgccccatatcataacctttttaaaatttgaaatgacccagacagttaattagtacttaaaacaattttaagatttttaaaccatacaaaagttctacctactggcatttgtctcatttatatttactcaatttatttatatttagaagtttacctcgattactcatgagaaccaagacaatagacaaagctagtcatcatttcaagtgattttacagttagccattttcatagcctgtgaatatcaggtgtttatttaagcaaagtccttaaagttaaacacacaggcattttggcagtaactcagaaactttagctaatttaattggactaaaaatattcaattagttttacttatcaaaaaaatcacaaaaacgaagactattctggtcttggataattatattcataacctttatttcaaactctgacattttataatatttagctgaggccaatataaaactctaatcagtaaacccagaaaaaattatgttgacaattctaaagacatttttcttttactaataattttaaagccagattatttattaaaaattacttaatcaacatgtactttaaaaatttggacataatttataggtactcatgtacttacaagtcatttggtaccatgatagatataatatagaacataatacacatacaaaaacataaaaatgtaatacttgtatacagacacacaaacaaaaatccaatagcttttaccttcgaactctagacatgagacaccaccacaaactctttattttacaaagatttctagatccaaattacttctaacaaaattgagatccgaaaatatggttaaactttgtttgctcttataggtaattcaatgaagtctgtggaccaaaattttggatagagcagtttctatagaagtttgattatgaaaacctgttttactcttttgtttccctcgatttcaaatgatttttaatgtctacatttcagttagaattggccaaactgtataagaaaaatgatatcccaaaatggccttgaattagtgagttttttctccacacaagtagcttaataatagcatattcaaataaggcaggaaatgaaagagagaaatagagaactttagaagaatctacttaactctatagttgcagcttaaccatttgagctccgaacttttcttttgtaatttgctcatcagttttaaaatgtacacaaaaatgagccataatatgtaaccagctagagtcctagaaaacccggcatgcctttcatcttctgctggagtttcaatcctttctcccatttctgctctgctctatttctcggtagccagactaactgcaacaacagtgtgcttgctgttcttatcatactttaatatattagctattaaatatttataatacatgctcagtccccactggcattttctgagcattcccatattcacatatcagctcacagcagttgagcagttgggcgactcatttcacatgcatgttgctgaccacctcaggattccctccacactgactcatctgtggttctattcgtgatgccaattgttacaagaaaagcttaagactgtaatgttccccaccaaactgggaaggagccaagagaccaaagactgactcagacaagttcagcttaatgaatagatgagtttattaggacttacatttgggcactcctggatggtcacaggacagttgtagagatccacactgactcccatctcaaaactgcttttaagctaattttctaggtgtttgcctactgtgtttgactgatgaggctgtttttttggtaggttctcatatattttctgggatgtttgggttctcatgcatacctgctccttggttgaatagcatagccttagctcactgcccaagcttcagagttcaagcagtggacatacacccttaagtaacctagtgggtatcttgccacaatataggagcttaagtaacatacatacacccttaagtaacctagtaagtatcatgccacaatacatgagcttcagatttttctgtgttattgacatgatattagaggaaaaagaagctcttggatagaatggcaatgataacatttctccaaccctacataaatcctacaaaaagttaagtgagaaaggtccagtttcactctcattcctaatacaaagcctgctgagtgaaaatggtcatgagaagcttgttcacagtaaagactatggacaacagtcagtctacctccattaataaaatatagactaccttggccgtgagcggtggctcatgcctgtaatcccagcactttgggaggccgaggtgggcggatcaggaggtcagcagattgagaccatcctggctaacacggtgaaaccccatctctactaaaaatacaaaaattagccaggtgtggtggtgggcgcctgtagtcccagctactcgggaggctgaggcaggagaatggcgggtgaacctgggaggcagagcttgcagtgagccgagatcacgccactgcactccaggctgggtgacagagtctcaaaataaataaataaataaaaataaaaacgaaataaataaaataaaatatagactaccttgcagtttggcctatgtgcagaggacagatgatagcagctattgtacatttctacaattggaagaatgtgagtgagaaggggaaaaattaatgcatcaaccatatcttaagctcaaactcatatgtaagaagtcctcaatataatggtggccataaccacgttttcagaaaaaaaaaaaattatggccagtgaaaatgattctgagagcatctacttattttagaaaatacatattaaaaagggggtatttatacctaaattcaggtcttttactttttttgtgtgtttttaaaaaatcgttattggataatacattcacagggttcagaattcaaaaagtactacagaatttgcagtgaaaagctttttttcaggtaatttgtgttagcattgacttgtgtatcttttcagagatacctgtatatattcaagcacataagcactaactctactacctccacactttttcgagaatggcatattttaatccttttttttgcattctggaattatcatgtaaaatttattgtggagattgctccatattagtacattaaacattcgctcatttttataacaactttttaaaaattttaaaatgtagcacatagaggtaagactacttaacatataaatttatagtttcaataataataataacacaagcacttaccacccaggtgagtaaaatagtaacccaggttaagaaatagtataattctagggatttagaacccccgggtgatcctccttagtagcatctgtctccatttgaaacctctcagaggcattcactgtcttgaattttgttacttaatttttaaaataaatttgccacccacatatatatccttaaataatatattaagaggatgtcaccaagatggcagaataggtcacatgctcatatcccctcacaacaacaagaatcccacactcatccacagatggaagtctctctgagggagcttggagattcaggtatgaggctgtgaaatcccagtggagcccaaaacttagggaggccattttgagtgtgcagaccagcccacaggtagcagacttgctgattttgctcctgagttcaaacccataaatttgccctgctccctaaagggcatggctacagtcatgtttggcccttaacctgaaatcaaaaccatctgccaaaaggtccaggaagaatctttcacactagtgccttggcagaaaggcttggctgcctgctgacatcagtctcagcaacagacctgaaagttacttagtaactcaacctctgctcccctcagccatggtcccagcttattactgctcacgcaagaatttagaggaagactcactcatatcttgtagcctggaaattatttacccatctgagactccatgataggcacagcagcctctatctcaaagcagattatgagaggcttcagtctcatctctggcctctcttgcttcagttaggaagctgtaccacctatgtagggagttgctagggattcacccctgctggggacacaggagtgtgcttgctggtccccatcctacagcagattctgagagggcccagtaccagctccagcctctctcactacagttgggggaactgctccatctgtgcagaaaactgcttagaagtgcacacatctaggctactgagaagtctcaccaacttctatcccgctgcatgttctgagaaagtccaatcttgactacaacccctctgacttcagtcagaggattatcttacctgggaagagaactgctgggaaaattgcttgtctttgccaacaggacaatcttccaggctcagttccctagccagcttttcacacagtccgagtataaccctgccttgggtcttctccaagtacatacagcccaggtcatcacactaaccttggagttctcacaagatttaaggtgaatctgggtttaggttttcttctagggctgagaaagtggcagcagtcatgggatttgacaatattcagcctctgagatttctggacaagcccacagaagaaagacaggcacgaacaaaccagactgcatagattggagtaaatacctaattcttcaatgcaccgacatcagtgtatggctacaagtgttaggaataatcaggaaattatgacctcatgaaagggacaaaataagttgccagtgattgaagctaaatagatggagatgtgttatattccagacaagaaacttaaaacaattccattaaggaagctgtattagtccgttctcaccctgctaataaagatggacccaagactgggtaatttataaagaaaagaggtttaattgattcacagttcagcagggctgtagaagcctcaggaaacttacaatcatggtggaaggggaagcaaacatacccttcttcacatgttggcaagagagagaggtgctgaacaaagtgggaaaagcccctcataaaaccaacagatctcatgagaactcactccctaccatgagaacagcataagggtaactgccctcatgattcaattacttcccaccaggtcccttccacaacatgtgaggattatgggaactacaattcaagatgagattttggtggggacacagccaaaccatattgttctgatgctggcccctcccaaatctcatgttctcatatattaaaacacaataatgccttcccaatagtcccccaaagtctgaactcattccattattaactcacaagtctccaaagtgtcatctgagacaaggaaaattccttctacctatgagcctgtaaaattgaaagcaagttagttacttcctagatacaacgagggtaatagcactgggtgaatacacccatttcaaatgggagacattggccgaaacaaaggggctaccagctgcatgcaagtccaaaatccaattgggcagccattaaaccttaaagttccaaaatgatctcctttgactccatgtctcacatctagggtatgctgatgcaaaagataggctctcatggctttgtgcagctctgagtatgtggatttgcaaggtacagccacactcctagctgctttcacggtctggcattgagtgtctggaggcttttccaggtgcacagtgcaggctttcagtggatctaccattctgggatctggaggatggtggccctcttctcacagctccactaggcagtaccccagtggagactcagtgtgggggctcccatcccacattttctttccacactgcactggcagaggttctccatgaaggctccacccctgcagcaaacttctgcctgggcatccaggcatttccttacatcctctgaaatctaggcagaggtttccaaacctcaattcctgacttctctgcactcgcaggcccaacaccatgtctaagctgccaaatgcttggggcttccaccctctgaagaaatggtgtgagctgtaagttggcttgattaagccacagctggagatgaagcagctgggatatagagcactatgtcccaaggctgcatagagcagaaggactgtgggcccagaccacaaagccattttttttcctctgaggcctctgggcctgtgatgggaggggctgccatgaaggtctctgacatgccctggagacattttccccattgtcttggcaattaacatttggctcactagttatgcaaatttctgcagccagcttgaacatctcagaaaatgggtttttcttttttattgcattgtcaggctccaaattttccaaatttttatgctctgcttcctcttgaatgttttgctgcttagaaatttcttcctccagataccctaaatcatctctctcaagttcaaagtttcaaagatttctagatcagaggtaaaatgctgccagtctctttgctgaagcataacaagagtcacctttgctccagttcccaaattcttcatctccatctgataccacctcagcttggacttcattgttcatattgctatcagcattttactgatattactatcagacttgtcaaagcaatttaacaagtctctgggaagttcaaaactttccacatcttcctgtcttctgagccttccaagtctctagaaatttccaaacttttccacatttttctatctccttctgagccctccaagccattccaacctcttcctgttacccagttccaaagtcatttccacattttcaggtacttttacagcagcaccccagtccctgtggtaccaatttactattagtccattctcatgctgctaataaaggtgtactcaagactgagtaatttataaagaaaagaggtttaattgactcatagtttagcatggctagggaggcctcaggaaacttacaatcatggtagaagcataagccaacatgtccttcatcacatggcagcaggaaggagaaatgccaagtgaagaaggcaaaagccccttataaaaccaacacatcttgtgagaactcactatcactagaacagcatgggggtaactgcccccatgattcaatcacttcccaccgtctccctcccatgacacatgaggatttggggaactccaaatcaagatgagatttgggtggggacacagacaaaccatatcagaatctcagtgaacttcagcaaaacacagagaaacaattcagaaatttataaaagaaattacacaaatttaaaaaatgaaaataatcaaacagatgttgtggagctacaaaacacaatgaataaagtgaaaaatgcagtagagagaatcaacagcagaattaatcaagcagaagacaaaatcagtgagcttgaagttgagttatttgaaaatatacagaggaggaaaaataaatattaatgaaaaagaatgaagaaaacttgtgagatctggagtatagcatcaagcaagcaaatattcaggtcactggagttcaagaggaagtaaaaaaaagaataaggagtagacagattattgaaagaaataataacagaaaaccaatcaaaaatgaaaaaaaaaaagatgtaaatatttaggaagaggaaggtcaaagttcaccaatcaaaatcagcccaaatatgattatcccaacacattttataattaaattctcaagtttcaaaaagaaggagaaccctgaaggcaacaagagaaattaaataacatctaaggcagattcaatatgcctggcaacagggttctcagcagaaaaatagagaaaaattcaggatactatagtactgtaatcatggtgtataaaccacttacaattttaatatgaggactaaaagaaaactatttaaaaaatagctacaataatttaagaaataatataaaaagatgtaaattatgacatcaagaattcaaaatgtgaggagaggattcagttaagtgtacaggtttttttgtttattttctttggtaagttgtaatcaagttaaaataacttcttcaaactataagatactattgtaagcttcatggcaatcacaaagcaaaaatctgtaagagatacattaaaaataaaaaaaaaaatcaaaacatattaccagggaaaattacttaattataagtgaggacagtgagagaggaaaaaaggaggaaaggatctacaaaataactagaaaacaagtggcaaaatagcagttgtaatttcttatctacatataattacattgagtgtaagctgattaaattctcccattaacagacatagattggctgaatgtttttctgttctattttgttttgttatattttagaaaaaacagtacccaactatatgctgcctaaaaaaggcttactttacctgtaaggacacagatacattgaaagttaaagtttgaaaaaagacagtctatgcacatgaaaaccaaaaagagcgggagtggctatacccatattacgtaaaatagactttatgtcataaactgtaataaaagaaaaaaggccactatataatgataaaggtgtcaatgtagcaagaggatataataaatttaaatataaatggattccacatcagagcacctacatatataaagcaaatattaatagacatagtgggagagacagaccatgatacaataatagtagggaattttgacatcccaatttcggcaataaacagctcatacagacagaaaatcaacaaaaaaaaaaattaatctgtactctagaccaaataggcctaacaaacatttgcagaacgttctatccaacagctgaagaatacacattcttctcaacaacatgtggaacattctctaggatagatcatatgctaggttgcaaaataaaccttaacaattttttttttttttttttttttttgtgagacggagtctcgctctgtcacccaggctggagtgcagtggcgggatctcggctcactgcaagctccgcctcccgggttcacgccattctcctgcctcagcctcccaagtagctgggactacaggcgcccgccactacgcccggctaattttttgtatttttagtagagacggggtttcaccattttagccgggatggtctcgatctcctgacctcgtgatccgcccgcctcggcctcccaaagtgctgggattacaggcgtgagccaccgcgcccggccccaacaattttttaaaaattaaaatcatatcaagtatttgttatatccacaatacaataaaattagaaatcagtaacagcaggaactttgtgaactgtacaaatacatgaaaattaaacatcatgctcatgaacaaccaacagatcaataaatatagtttttaaaaaattaaaaattttagacacaataaaaatggaaacacaatatatcaaaacctgtgcaatatagccaaagcagttctaagatgagaatttatatcaaactaaataaaaaaagtagaaagatcttaaacaataacctaacacttaccattatcactactattcaacacaattctggaactcctagccagataaattaggcaagagaaataaataaagggcatacaaattggaaaggaggaagttaaagtgtcctctgaagattctacaagaattattaaaactagtaaacaaattcagtaaagttgtaggatataaaattaaaatacaaagaccagcagtgtttctacaccctgacagcaacatatttttaaagatcaagaaaacgatgccatttataatagctagtgaatgaatgaatgaatgaataaaatacttaggaatacatttaagcaaggacgtaaaaatatctctacaatgaaaactataaaacactgatgaaagaaattgaagagaatacaagtaaatagaaagatatctcatgttcatgaaggaggaggattaaggttaaaatgtccatactgcccaaagcagtcaatacagtcaatgcaatctctatccatagatgaatgacattctacacagaaataaaagaaacaatcctaaaatttgcatagaaccagaaaagaccctgaatagtcaacatagtctggagcaaaatgagcaaaactggagtcatcacattatctgacttcaaaatagactatgaagttataataatcaaaccattgtggcatagccattaaaacagacacatagaccaagcgaacatatcagaaaacccagaaatagatccatacatttatattacactacttttcaacaaaggtgccaaaaacacatgttggaaaagagcagtatcttcaatgaattatgctgagataactggatgttcacgtgcagaagaataaaactagacttctggcttccatcatatgcaaatatcaactcaaaataacttaaagctctaaatgtaagacctgaaactactagaagaatataggtaaatactttataacatttgtctgagcaaggaatttttgtataagacctcaaaagcactggcaacaaaagcaaaaatagacaaatagaattccactaaactaaaaagcttttgtacatcaaagcaaacaattaagagagtgaagagataacctacagaatgggagaaaataattacaaactatgtgtctgacaagagtttaatatccaaaatatataagaaactcaaacaattcaaaagcaagcaagcagtcccattttataaatggggaaaataccttagacatttttaaaagaagatatacaaatgggccaacagttatattttttaaaatgctcaaatcactaattatcagggaaatgcaaatcaaaaccataatgagatattatctcaccccagttaaaattgttattaccaaaaaaaagactgaaaataacaaatgccgaccagaatatggaaagagtggaactcacacactgttggtgggaatgtaaattactgcagtcatcatgtacaacagtatatggattcctcgaaaaattaaaaataaaactaccatatgattctctaatcccaatattggatacacattcaaaggaaatcagtatgtaaaagatatatccatattcccatatttattgaagccctattcacaataaccaagacctggaatcagtgtccattgatggataaatagatacaaaaaaatgtggtatctatgcacagtggaaaactagccatataaaagaatgaaattctgtttttacaacatggaggaggctagagaacattattacaagtgaaataaaacaagcacagaaagacaaataccacatgatattgcttgtggaatttgaaaaagttgatctaataagaattaagtgcaaaatagtataacttagcaaagttatagttaaataggagaaataagttctggtattctattacacagtacagtgactgcaattaataataatgtattatatatttcaaaatatctagaaaagagaatttcaaatgttctcatcacaaagaaatgaccagtgtttgaagtgatggatatgctaattaccctgatttgatcattacacaatgtataaatatatcaaagcatcacactgtactatataaatatgtacaagtatgtgtcaattaaaaataaaacaaaacaaaataaaaaataaagagtatgttattagttttgaaaccctaagtggtaaacacagattatctttgtaagaaaagggcatctcacaactttttagatgtggactcacaggagactagaatcttttaggggacgtcagtggcaccatcatgagagttttggaaaatatgtaactgaccacagtctaagcatctagtgaggctgaagggtaaaacacgtaccgagccatctgggagatacttgatcaaagagagtgagccgctcttatttttatatcccgagttcaacacagtctatcttgagtgctcagaagtactcaaagaacacatctgtgggatgaaataagtgacctaagctgattcagcctgcctaacgttgaaaaggggatcaggaacttcatccgtacattgtcaataagcacaggtcagtattaaaggcacttagtgctactggcttttgagcttgttgaggattctgccattctcagatttctagctggagatttcattattgggtgcctgctatatgggttatcctttgcctgtctgctgttcagcttccaaaattttatgatcgttatcttctctcccaccatccttattcctttgtattttatatctttttaaaaatgtctttatggtaattctattgagtatttgactgatagcaaggtcaaactggaacatttaatttataggctttgccaagcaacctataaaacctctttaaagaaaatagtactgacatatttatcaataaatttaacctatgtattgtgtaacataccattttataaagttggtaaaatacagcaagttaacattgtagtcaaatataccccaaaccatattcaaaagtattttattcttaccataactgtttttcttgtttttgctttattctttttaaaataaatcaaaagtgtaagtcaaatgaaaagtttgatttttatcacaaaaatcatgggattgagaaagattgctttggggagattttgagagactcatgaagagatttggtgtaactctgacttcgtcaaagaaactcaaggatatttgctcccctgactgattttttctcttaattgtaaatttcttctaaaacaagcaatagtcttaaaatacatctccctaattgtgagtatgtagtagataactctcaggggtatcaccccagcccatgcctctattctccataaactgtttctgtaactacaatgtcaagtatatatggatgtattttcttgccacttctctgatctaaaggaaatgagtattcatcaaaactattctgtttgcaggaatctagaagcagaaatccccttcatagttcctgaaagtgtatgctctcagttctgaaattaggacaaaatcaatggcctcacactttctgaatgtctgggagaatttcttctcacttgtgccatttacccacccttggtgaatgattgtactacaatattaggggcctcccgccaagccccatgtttatagaacattgaaaattatagaacacaggattcattataattgaaagactttcattattcaaaatgtaaataaatagtgaaaaactgtgtttatggtcagaaagctggaataataatacattgaagtcacaggaaaataaatttacaggatgggttgattgatagtgtcaaagagcataaaggaaaaccaatttgtttgtttattttcaaatgtgtagtttcgggagtttgaagagagcctgaaataattatagtatgtaaataacaaactaggagagaaagcatttataaaccagaggccacaagtttacactttgcattttatacatttggcagtgaaagaaggtagaaaaagaactatgacccatttgtaaaatacttcttgttttcagtgttgcaaacattaatactccgatggatttttaatgtgttttaaaatcaacagtaaaattattaaagacatcatttttgaggaaaactgcattataatatcatccatgtagaagggtttggtaaaatgcagatccaatgcttgctcacgcttatgaaagattaccaaaaggctctcacatataaaatgatgccagagagaactggaggaataatgtaattagatttgttgaatacctccaagtgggttagcttctttcttacatttaaggttaagtcagagtcaaaatgagatttaagatagattgctgttaggaattaactgtggcacagatcagaatgactgcattattatgtgttgagtgtctcaggcgtctttgattgtaaacatcagaaatgagctctggcttattcgaataaaagtttagttgttagaaggacagtaaggtaattcacagaatcaaaggaaagctgaactagctaatggaagccttaagagctagactggctttgagagactcagcagcagaaacccagggaccatctttccagagtctcactgtatggtaatctgccccaacagccttacattcctcctttccatttaagacttttacttcctgggagataaaattgaattgactaagtctggatcaggagtctctctctatgtcaggattagtatctcacggccagaagatacagtaagaacaattgtgggtttgaagccccttctgtctttcagagctttcaattttctatccagcctgttggctaagacagaccctttccgttggaatcttggtacatacaggacatctatgtttggcctatgctgtggaagaataagggttcaaaaaacagcaagtgctctgctaattccctgcttgtaagatcatctcccataagctccgtatctgtgccatgtggcactagtggcatgtcagtgatcctcttgtttgacagattccttcctgtctcttatattcttcaccttatctgtaggcaaattgtatcagctctgcctttaacatagattcagaatttgaccacttctcatcatgtcccctattaccacagacgaggtggcttagacaacagtaatttattttctcacagttctgaaggctagaagtttgaggtcaaggtttcagtataggattaggacccagcctaatgaactcatttatacttaactaactctttaaataccttatttccaaataaagtggcactctgacatactgcgtgttaagatatcaccatatgaatttatggagggacaaaatttagcctataacattcactctgcccaggcccactagcctctatgcaggtcccagaacttaagcctggctggagggttcctgcatgagggcaagaactggatgtttctatctgcttggacaatgattcctccagatatctccatgtctctattattaacttcggtaaggctttataaatataccaccttctccgcatgggtttgtctgcccaacgtgtttaaagatgcaaccattaaactcagcacctctgtcacactccctcattcatttccctgcataatacattattttgtttattgtctatctccccattagaatataagctctatgaggagctgttttaactgctgaatcttagcagtctataataatagtgcctaacacatagccagcattcagtaaatattaattataatttaattcatcaatgtctgaattagttggtttttgaatatgacctagatgtgcaaaagtcactcatttccaaacccaattaaaaataagttatttctaaaaattctgagttcccatagacatatgatgccattaaaaaattaaaaaatgtttcatgtagaaatgtatagtataacatagaatgataaattgaaacttccattacattttatcttttcaaacccagtttctatggaatgctataaaagtaagcatgaattaacgttatcatttcctaagcttaaaaaaggattttctctccaaatgggtaagtactaatactactacttaaaaaaaaaaaaaaaggcttctttgcaaacagccagcactgttgaccaggcatgagagcaggtgtgggaatcctgaatcaagattctgaatcacctctctgcttaagccagggagaaggcgctgctggaaagacagagcccaccgtcctgccaacggcaagtgcagaggcaattccctgttgagttttgcttctgccttatgcttcttggaagcagagtgtggttgttaatacatcagaaagactggggactgcaaagaggaagaagagctggagcactactcagtaaatactttaaagtacccctgggattgaagtaagtgtttggagtgagtgagactgtttacctaacaaagcttatattatcacatttcacattttgcctggctccaatgatgtgagccacataaaaatgcattcaactgtggcattcccctgcttcgctggctttaattaaacttgctttgtgcttaggaaatttgcaaactctttgcagtggaggaaagaaaaacacgggttattcacatgggtaggtttttccctttaactcacacagctcagaagttttgtcatattcagtgactctggtggttacagcacagtgccaaaattcattaacagactctgctcaccattcctgggaatggaattgccacctaactctagtacacatgattgatagcatcagagaagaaggtcactagattctggcccttatcgagatctgtcactctgtgaaatggcttcacagaaatgaacagaaaacgatggagctccttgctgtgccaacagaggcatcggcttgggtatttcctggcctttctagcacacactactccacttcacctgggaatgactggctggtggtgaagggctaagcccatagcaaactacctttcagttgttacaaagaaataactatatgacaaatcttcaggcaagaaaaattaattctttagtagcaacagtgctcagtatttcagctgagaggtaacagaaatctgggagtgaaaagaaagcaaagctcttcttgcagtaatcgggggataatttcactttatttcagggggaaacacaaaactgttaagaagtaattaaggcaaataaaattgatcctagagaaaaaatttgaaaattccataagcctcaaatttgtttgaggtcaaaaatgatacggtatggtgacatatgtccttaaactacaaattgtcacagaaactacaaattgtccttgtgctgcccgatagatttgcccatgaccactgaagataatagtccacttaatggaattccaaagcttccagaaaaaaacagccatcccttaacgctttccttttcatgtactgcttcttggattccttgaataatgttaattatactctctcctctctagtctcctcttcctggaatgttccaatgccttcctgcctttgcatgtgctacttctgatagaaggtttcccaagctgggaaacaatcccctttgtggtatttggagacttcaaatgagcctcattctatactcatgtaaaaccactgttttccatacctagaaataagtcaagcagtttagggtgcatcatagacctgattgattaatacatcatattgttcatcttggaggttcatagagtagtatgttcatcttggaggttcatagaaggtgctggactcagggtacaagttctgccattccagtttgagttcacttatatgccttgactttgtattgatcttcctactatttgacatgttcatttccttatatctggactccagttcctgagaaggtgatgtgctgtattcgcaattttgggaacagatgacataaaaaatgtcatactttacctcccctcaaagctccagtaagagacagatattcaactttgaggtggatgcaaactgcctctctccaagggagggatttatggccttagacacacacttatgagaaatgaatgcaggctggtattcattgttcaagaggctcttatctcaattgttgctatgccttaaatgtgcttctctctatccttcataccctccttcacctgaagaacatttatatccgttttaactcacaacctaaatattacttcctcaagatggcattctctggctactatgtcaagaataggattccacccccatcacccactgctaaatttgactggccttaagagaaaaaaatttaaaaaaactcatattgtttccttttatattactttgattttttcccctttgtagtcttctcttttgtggttttttcctctattgtcattgtggatttttaacacttcacatgggcaaaaacctgcctgttttgtttactggtatactcctgcagctgtgatggtaggttttcatgatgaacgaacaatgtttgctgcataaacaaactaaaagagtaaaatataactatcaaaaaaataaaaccatctcttacagggaacacatagatatttaaagcaatattagcacttaccctaagaccaggttatgatggaaagaaagtactatctctaagcatggaggatgagaaccatgctcagtggccaactcgagctcagtggctagagttgtacacccctaagactacctatttatctattaactatggtttttagaaaattgatgttaacaaatgtgtgaagtattgtacattgtcatgaatcagttgttattagggtgcctcttattttgactattggctcttatttccccaaagtgttggggtctgaatgattagcctccaaagactaatacaggtatcaaaggatcgtagaagctacaaggagacaggttgcaaaagataagtgtccttctctatgattgtctgaattcaatatacgggaggtctctaattgagagtggggagctaaatgtgccatcactgaaaatggttgaagtagatctcacgagagaaatagtttctaagaagtaaagacattgaaagtttgaccacaaaaccttgaaaagatgaagctaaaaaaaagcttgaatccaaagttaggtatgtgataaagaagcagagagcagcaattcatcagaaaggcaggcagaacgcaatcaacttttagagcatttctgttgtgccgcagaaaatgtttctgaggtccaggtcacaaggtgtcgttgttaaaatgatagataccctgtcccaggctgcaagcagtttacctagtccttattcccagtggctcaaaacctgcacttaactgcctggggacggggcatctcaaaaccaaatattaagataaagaactaacaagaatgaggaatgccttctaatgcttttcctcagatttcatcaaattaagcattcaattctcactgctgaaactaacctaagctggctttcaggttatggccaccacatttatttctgtgttcctaaaacttgatttgaaattgtatagaatagggccagatcttactggagacaagggtgatatagaggctaacagtgtaaggttactctgaaactttggaccacaatttgttaagtatttgactgatttttgttcgtatatatttggtgaacagactgagttgagggatctctgcaaacaacgcaagtcaatcatttaccagtcaagagctggacaatggatttttccaggaatctcatagttctccttaagactgttaatattggcatttccacactatgtcagaagggattatattcttctattaagattatttatttttgacttgattttcatatatattaaggtaatttagaataattagtgaaaatacatgtaattaactaactatagtaataatacgtataagtgaagaagaatggaatggtaatattcttgctggaagaatggaatattaccatttagtttcatccttttaagttgccacttatacttgttatactagagctccatctttaaaaaatcaaaatcagtgtaagaaagatgactcatcaaatgtagttttatttttaaaaaaaagaaagagaaaagtgttggctcccatgcattctctcctttgattgctacccccaagctcaacacttagagttctcacttgcctttaaaaagcttcctgtggtcatgattagttgacattgtagatgttttctttcattttcctttcctatcttttccatcaaatcctgtctctcaagtacatcccctttccactcctcttattcacagaaacccaacttcctagagacaccctgctgctaattaatggttacatttcaaccaggtacctttgcggaacaactcagaggaatagataaatcagtaaatacaataagtaaattgaagttgtatagaaagatggtgtattcataatgctatttttcttcaattgcaattaacaaatatgattaaagtgtaaaaatgggattctgagccaaaacaaataaaaaaagaaaatgtgttatctgtagaatacttccaaggcggcaacaagttgtaatcatggaaaagagagctctggaattagatagacctgggtttgattctcacactaccattactgctgttacctttagcaaatttaaaaattctctgagccttagcactctaacttacaaaatgggaatattaatgattacctccaaagctatatgcaaaaattaaatgagatttaatgtgcaatgtgcatttattcagtgttacatttttttcagccctactacataaagacacaactttagagccccttccaagtcttagatataggaaacacaatctgatgcacttagaagcagctgtttctatagctcctgtccttcctttacctttttatcccatggaaaggaagcagattaagaggagccatcaaggaaagaacagtggaccactccaggagtcaaataagataatgaagaaaacacaggtattggcatctcatctgtgctcaagtcctattgtaaccatttgatagattctgaccttcattcaatccttcaatcatttatcaaatatgtgttaagttattgctagatactggacattttggtagatactggaggaataggcgaagcagacatttgctgttttaggaaggaggaaggggtaaagacaattttgtaatctctataatggggaatgcagagtataccctagggggaaatcagtaaattgcctaatatagccttaagggattgagggaatagtgatgtatatgctgggcctgatgtatgtgttggagttatgggggaaaaaagggtaatttcattcaaaaacatgcactaaccaactatgtacatacatctgaaagtactaaaaacacagaggtgaaatatcagaaagatttctgtcttcaaggagcttaacttctgcaaatgttagataaacaaataggtaagtaaaatagagtacatgtcagtggtaaggagaaaagaaagaggagtggagagtgcttaggggagatctgaacagcgtgttcagtgtaaacctcacagaggtgacatttatttgagtggaaggatccctaagccaggaaaacacaatgtgcaaaaacacaagcatgaggcccccagatttaggtctaaatgtagcagagttcagtgagaggggaagaggtggagaatgatgagtctagaaagataaagtcctcatgggaatatataaaagggattatgttttaaaatatccactccaaaatattgacacccagaatcaaataaataataactgaaagcactttgcaaagcaacaagaatgttcagtatgatgattattattattattatttgagacagagtcttgctcttgttgcctaggctggagtgcaatggcacgatctcgtctcactgcaacctttgcctcccaggttcaagtgattcttctgcctcagcctcctgagtagctgggattacaggcgccagccaccataccggctaatttttgtatttttagtagagatggggtttcaccatgttggccgggctggtctcaaattcctaacctcatgatctgcccgcctcagcctcccaaaatgctggggtaacagactttgccaccccacatccggccgtattattattatttatagcacatattattattagggcaagttaatccattctctctaatcctcagttttactcatttgtaccatggataaaataatgactctttagtcttccttgagaacagcatggggaaaaatgaggtatttaagcattataaaatactttgaaaatccatactgcttttcatatgtatgatactatttgtcttaggaaaaaatagatacagcataagtaaacgcttgtcagcatacttttaagttctttcagctcttagagggttcccagaggggagaaatatatcagttttctatatatttcaagctcatctcttttgggaatatatatatttaaaagaaacaacaacaaaaaaaaatcaaggaaagaactttgtcagcagaggctccaaattcagcacaggtttgcaaaggtcctgatccagcaggatatggatggatgctctggatatcaaataaactcctaatgtggagggtgtagttcaaagttccttttcagtattgcacaggtaccagactcacatcagattatggggaggaatgtccagcaaccttcatgaccaacagctaccaagctatagacctttcccagattgctgtcatggactttgcactgatgtactaatccagaaaacattcataaccacatggtactgtctttgaaatgaccccaaggcagttcttcaaatttgttaactctgcttttcatttgtgtattttgtttacacatttaggaagactcaatgccagtatttgaaagtattgtttaaatggcaggcatatctaaaaaatattgtcatttctgtgcctctgctttccattttattttgaaacaaacaaaaacaattgtttagtccagaagagaataattcagagaaactgaagcttttggggagacgagagagatttattaagcatttaccatgttagttctacgacactaaaggtgatcccaaacattctcggaggtgttttgctggagaaacaaaaattatactcttgtatttaaaagtcctatgagttctcaaaaataataattactctttactaagcactgattatatacttagcactatcaacagccatcatgtgtctgtgtatacacacatataatctcacttactttttacattaaaactatgacataaacattattatcctcattttaaacacagagaaacttagtaacttccaaggtcacatagccagttatgtgataaagatgacaattcatctcagttctggcctccccaaatttcatactcttaaccaccagactaaatagcatccgtcaaagaaaaaatataagtaaataaggaattctactgccaattagtctggtgcttcacatgaatgtagagagaaaagctgtatatctacaacatcatatggcttgcaggagaaaattttgagtagagaggctatttaccaggtttcctggagttatgactagcatagataatatttgtatttggtttaattgctacatgtgcttaaaacaacagatctgaccagatgtggtcgcttatacctgtattcccagcattttgggaggccgaggcaggcggatcgcctgaggttgggtgtgcgagaccagtctgaccaacatggagaaatcccgtccctagtaaaaatacaaaattagccaggtgtggtggcgaatgcctgtaatcccagctacacaggaggctgagtcaggagaatctcttgaatccaggagacagagattgcagtgagccaaagtcatgccattgaactccagcctgggcaacaagagcaaaacactccgtctcaaaaaaaaaaaaaaaaaaaaaaaaaaattcaccagcaccaacaaaaaaaaacacagatctatccatacatgtgaactaaaggatctgaaattcaatctaatgatttaggggtaacccaactttgacttatccaagagatcatccttctccattagcataaaggattccaaattgaattttttagtaagtgcttttaaagccaggtccaaaaatttctcttttaaaacttgccaaatatttcagaaataattaagtcattagactatttatcaaaatagaaaatgcatattttcttatatccagcaattatatttctaggaatttattttacaaaaaatttcacacatctacttatagatacatagacagatgttcattgaagcattgtttaaacagtaaaggacaagaaacgaagttaagacccatcagtggagactgactgaaaccattctttattcaattaatattcctcatgcattctgtgtgtcagggattgcttggtcaatgtgatttggatttacaaatcacaatgacatggaaattttatagcactaagagacagaatattcaaagggtttcatgaactctttagtttatctcaaatgcagagagcaaaaatagataagtaatccaaactctaattttaggcctcttcctataggtaagaagagttttgaatcattgattgatgctgagccttaatcttgatactcacccctgtctgacaaatgacagaacagtgcccacagcttataaccaaatcaagtcacccgaagggttgactaaagctgatcccagcatgatggaggtagggaatgcaggtggctgattgtcctgacaatgtcttgaatttcccagggattggagtaggtggcccctgttaacattcaatcacaagaattgcctatgctgaattctattacaacgtgtgcttgttttattttgcattcaaatggggtgagtttgttcctaacatatttaattagacataaatataaaaaaaaaacacaaaaaagcagaattcctaaaaaaaacaaaataaataaatctttagggactcaaaaatatgcttttatcttcttaagtgcagttaaaagacaacttggaggaaagggcccaacaagcttgtttggcatatcttactttaaagaagtgatcataatctaccttcctctcatcattgtccacaagaagtaaaaataattatgtggctgtttggcaataaaagaggggtggttccttagagctcttttgggaattttcctgaagattatcacttcactctgtgtgtgtgtgtgtgtgtgtgtgtgtgtgtgtgtgtgtgtgttgaaggaaatatttagtagttacctttgagcagggtgcctggagatttttagttttggttgggaagaagactttttttaaaaattagtgttttatatagaataatgtcagatttagagaaaagttgcaaaaatcataccgagtgtccgtacattcctcatccaagtccccctatttttaatagtatatatctctatagtacacttgtcacgaataagaagccaacattggtacattactctgaactctaaacttagatttcactaggttttcttcactaatgtctttttacaatgggacttcttgaaaatcttaaaatataaaaaaatcccatatacatatgtaatttataatttcttttcataatccaaaatttgatgcttatttatcaggaacttacaatatgattaagatgctctaaggaattgagaggagtagttgcaaagaaaatgtaatcctctcctttaatttgcttataatatgtatattttttaattataatgaatattttaccaagaattatctgtaatcaaatgataaggattgctaaaaattgttatattgtttaaagagccattgacactttatattttaggcactgtgcaaggcattttacatgctttacatgcattatcttgcttaagcctcacaataactgcaaacaaacaagtgggtattacacctacttatctatgaaagccagaataaccaaagagacaacttgtgtaaggaaaaacagtatgtgacagagctagaatttgaaactcttttttatgacttcaaagcatctgtctcttttcactataccattaacaagttaatggtatagttcctattaacaagttaaacttgaccattataaggtcaaataagttgactttctatttctgaactcaagctaactgacaggatagggaaattaaggcaagaaggtagaggatattaaaataaaaaaggagactcatcaaaagtaaaatcgttgcacattaattttgcacattttgcataatctttaatagctattttaaatcacagtgtgctcaagacattaggaatataaagcacactcaacttcaatgttccttaatgtgcttgtagctcatacctgaaactgcattccactatgatttgttcccattttcattaaatcttgggcttttaaaaaattttatttcttcctcctgtagattcacctataaaatatgttgagaaatcatatcttctcctgaggccttcttttccagatactgtgtatttcaaagtgatggcccagaggtggaatagagattaagtggaggaagatgcatagagagggaggctgcatctgtggtgagaagaataaagcagagagagattcgaagagggaataggctcttggcttaaagtatcatcctctcttaacatgggtaagggctggcacttttcaccagagttgtattttcatgacatcatatttattcacaggtcttatagcttagaaaataaggactcagcaagaaattttaaaaagttattgaaattcagacttctctagaagtttagcttttttctggatagactctacactcaaaattaggaaagtacttagattaggtttattcagtatttctgagacttacaggattaagacagaataaaaaccttgcatgcaactgtgcctcattaccaaggaggaaagtagtaacccattaaaatcaaacactaatgattaaacagtattaaatcagtcttctcagtcttattaatgcagactatcatttcttgaaaaaaaaagctacccaaataaagatatgagattactcatggtgtaagtgaacacaaaaataaatacaactaagacaaatcaaattgctatcttaattacactgtaagttctttgacagcaaggaacatgctctctttttcatgtattatccagcttaccttgaaacctttgaacatgttcttcattggtgaacccattatttgtgatacaataactacaacaggaaataactttcattaatttgcatcatgacttagagaaacaattcaagagtttgaattaaaacacactggctatcactggctctatgactttcgaaaagcaatttacagtacagaattgtaatgacatatgagaaagtaattttaaaagtaaaggtgtatatataatgttttactatgaatagtgtaatatatagttaaataacttagctggcccctaattatttatattattcttacccagagtatgtttgacattacaatgattgtataataggttacaccagaacacaggatgtgccattcatcaaatcttattctaggtccccaaacagatacatatttcagtgcaaacactgtagggagatgccttgaaactattgctatggaataaaagatgaaatgctcctgattattgtaaatacaaaattgcatgcaggattgtgtaaagacaatgccaggttgggctgccagaatgagccaacagcgcatgatgtgcttccccctgcagagagcctataaatgaacgtgcagtcagggaggtttcacatcaccaagattcctatcccagaaaagtagatattcatagctctgggaatggaatgcgacccttgtggagagcctataagaggacacatgcggggcgcctgttcatatggataagatagggctataaaagcccttatcttgccacagctcttctaggtctctttagggttaaggcacactcccttctgagaatttttggtctaaccagttgtctagcttaacttcctgtttctattgattgttcgcaaccagcttttgctgcaactgttactgctgattaatatcttgctaatcataggttatggatagactgtgtttctgttttaagactctgttagaaattgctgacacacacactatattgaaaattcttatctctgtatactgtacttctgcataccgatgttatgttaaagaattacttcatccccatgtgaccatctcacctcataatcaaacgaccctaaatccctcactaacctaccccgccctcactaaacttaataataaatgctggtatacccagtgcattggcggcatcacaggaccagaaggcggtgacccccctggacccagctttcactatcttgtgtgtgtccattatttctcgtcctgccgatctgcctgggaacaaagagagagtcccattgcattgcaggctactggccagatcccgcaataaaacacgccatatcatttccttattagtaagaagactagctgatatttaacatatcagatttaatttgattttccaataatgcagaattatacctggcagctcatttactttactgtgtacaagtactctcttcctagtgtttgcaggatgaaccattgtcttaggtggaattatcgcagatacagactagtagccaaggatttgagtgcaattgatttataaggtaaatgttcctagaagtaactggtaagggagaggaagaagctggacagaaaagagaaataaactgagcaagggtacaatttcagaagttccagcctcagtctgatctcacagggagctacggactgtacattataactcaaaatttgtggtcccaggaggcaagggaacagcagccagtctttggctcttggcagcagtgctggggtgtgggttggggagagtgactcagagggaggcaagctgactcagcagaaacacctgctgtctttcacagtttattatctgcctgcctgagtcaaggatcctttggtcacaagtaataaagggtacctcaagcttgtttaggcaaaaagaaacttattaaactaatatctgactatgtcataaaatactagataggaataatagcctgggacaccagggactgaatgtggaaaccagaaagccaaaagggaccaaagaagtctttcattttctatctctttccccaatgtgtctcttgcctctgtttctttctaaagaaaccctctctctgatgctcttttgtatattatgccctccagttcctgaattttcatgaactttctgttgcagagaaaatgtagactgactcagagcttctatctcttagttttagaccttgtaagagggaatctggttcaggtagcaatctttttccatgagattgctgggaaggagaaagccagcatcataaaatttgcctggaagaacccatccctggcaactcacaaagaatcagtgtggactagacaaggaccctgaaagcatttctaatatactacataaaacctactcttccaacaagtagaggagtgtgtaggaggtggcagttaaatgttttgcttttaaatgtacagtctacctttgaacaacatgggtttgaattgccctagtccacttttgtgtaaattttcttctgccaaccctgacacagaaagatgaacccttcctcttccttttccttttcagcctactcaatgtgaagatgacaaggaggaagacgattatgatgatccacttgcacttagtaaatagtaaatatgttaatatattcttttccttataattttatttatttatttatttattttactttaagttctgggatacatgtgctgaaggtgcaagtttgttacataggtatacatatgccatggtggtttgctgcaactatcaacctgtcattgaggttttaagtcccgcatacattaggtatttgtcctaatgctctccctcccttttcccccaaccctctaagcccccgacaggccccactgcatgatgttcccctccccgtgtccatgtgttctcattgttcaactcccacttatgagtgagaacaggcattgtttggttttctgttcctgtgttagtttgttgagggtgatggttttcagcttcatccatgtccctgcaagggacatgaactcattcttttttatggctgtgtagtattccatcgtgtatatgtgccatattttctttatccagtctatcattgatgggcatttgggttggttccaattctttgctattgtaaatagtgcagcaataaacatacatgtgcatgtctcttaatcgtagaataatttataatcctttggggatatgcccagttgggattgctgggtcaaatggtatttctggttctagatccttaaggattcaccatactgtcttccacaatggttgaactaatttacactcccaccaacagtgtaaaagcattcctattcctccacatccttgccagcagctgttgtttccagactttttaataatcgccattctaactggtgtgagatggtatctcattgtagttttgatgcacatttctctaatgatgagtgatgatgagctttttttcatgtttcttggctgcataaatgtcttcttttgagaagtgtctgttcatatccttggtgcacgttttgatggggttgtttttttcttgtaaatttgtttaagttccttgtagattctggacatgcgacttttgtcagatggataaattgcaaaaattttctccctttctgtaggttgcctgttcactctaatgatagttagattttgatagttacattttgctgagcagcagctctttagtttaatgagatcccatttgtcaatgttggctttcattgcaattgcttttggtgttttagtcatgaagtctttgcccatgtctatgtcctgaatggtattgcctaggttttcttctagggtttttatggttttagattttacacttaagtcattaatccatcttgagttaactttttgtaagatataaggaaggggtccagtttccattttctgcatatggctagcccgttttcccagcaccatttattaaatagggaatcctttccccattgcttgtttttgtcaggtttgtttcaacaacatcttcaatcagatggttgtagatgtgtggtgttatttctgagggctctgttctgttccattggtctatatatctgtttcggtaccaataccatgctgtttgggttactgtagccttatagtatagtttgaagtcaggtagcgtgatgcctccagctttgttctttttgcttaggattgtcttggctctatgggctcttttttggttccatatgaaatctaaagtagctttttttagttccatgaagaaattcaatgatagcttgatggggatagcatttaatctataaattactttgggcagtatggctgttttcacgatattgattcttaatatccatgagcatggaatgtttttccatttgtttgtgtcctctcttatttccttgagcagtggtttgtctctgcattggtcttgctgattgctgcagactggagctgttccttttcagccatcttgccagtggaaaaaaagctatcattttcttaacaacattttcttttctctagcttacttcattgtaagaatacagtatgtaatacatatagcatacacattacttgttaatcaacagtttgtgttatcagtaaggcttttagttaacagtaatctattattaggtaagttcttgggagtcaaaagttatacaaggactttccagtgcaggaggagctggtgtgtctaacccccaaaatgttcaagggtcaactgtatttactatacagattcggtgggaaacaaaagcagattgtgtggtctgtttactaatatcctaattattccctattacagataatgccattaaaaactggaaatacagaaatgcataaactagcatcgagaattgcctaaatttaagatggcccaaaatgactgattttcatatgtagttagtagcactgtaaattggtacaacctcttagaaagcaatttgattataagcattaagagccataaaagtgttcatgtccattgaccccgtaatcttacttacaagaaactatcataaagagttcaaaatatggggaaaacttttatataccatatgtttgttacagaagtacttgcagagaaaaaatagaaaataatcttaaaatgcttcaaaaagggaataattaaataaaccactggaatattcttcagtcattaaacttatgttcatgggaaatatgaaacaccatggaaaaatgtttatgtgctcttaagtgaaacagcagaatgccacactggaaggaaattccgagagagagaagtgtaaaaatgcgttgaggataaaaattatcctaagacactaatcattattgaattcaagtggtaaaattacatgcttttaaaaaatatccagaattgtttccaatgtgtttatttaataaaatagcttacaaaattgctaaaatattaccatcaccttatatattggatacagtttacattctctagagctgcttcttactactcttcaatgggctacaaactctcttgaaacctattactttttgaaaggattttatcagttaaagactatatctctaagcacttgaaaactactgagaggaaaatagacaagccagcttaagtaactactgtgaagaaactttagaagagtctgaagaagtggctttatttagaaaaaaataaatagtagaggaggagaggacctgtaaatccttagaagtctctgaaactgtcaaaaataaagcagcaatacagtagaagaatctacagctttcagtatagattttataaagtatccagtaaggcagcaaaagaaatagcaattagcacatgctcaagaaaccattagccatgtagattttcttttcccagtgattattagcttgattctcctgcctgtttataggaggatggagtattacaaaatcacacagaaatgaaagaatttacatctcccattctcagagtaagtaaatggtggctctcttattgaaactgctttgaggacataatgctacgcctatacagcatgaaaggagaattaataaggccatcataatgggtcacaagatgcaatgcaatactttccaaattatgttctgcagcaaagagtcctccaaaacatttcttttaagaaaatattttggaggtgaaatgtatttgttacatgttgtgtatgtgtcctctataacaatcagtatattcctaaaaatatttcaataaagaacactattttatcagaatttcccaaactttgctcatgaaacctcaccctaaacactcctcaataaactaaccatcggaattgagtaaaataagtgttctataaaatatagtttgttaaatatctttgtaatgttggcaggtttcagaacctactagtgctaggatcaaatccaatttctgccacatggtagcttcaagaatctgagtaattagttgaactgtcttgtttaactaaagatctttaagcagttttagcccactgaaaatatagccataaacaagcaagaattcattaggaacaggcatcccttatatctggtaatttctgagatatttctctcacttactcctctagaacatactatttgttatcctagctcttccgtctctgggccgttcttcctagacctcagtagttttctcagcctcccttatcatcattcctgattttgatacacatttccaggtctgtttggagatgacaaagtctggactcgaggctggagcggagcagcacaggacggccacgcaattgcaccactgagcaactgtgcagcagctagaaccagcaagagaagccccttcctccggcagtgtatgccctctactgagtatgtttagcattctgctcactgtaaaaaaagaatgcttaagatagccagtccaatatcacagctggtgctgaagggcaaatgtgcagctgaaaagcaataaattaatactggcccagtagtagtgtctaattatggttttaacttgcatttctctaatgactaataatattgaacaacttttcttgtgtcatttgtatatcttcatttaagcgtccaaatcttttgttaccctccattttttaatgatttttcttcatattttctagtagtaaggctttttcatattttctttatatattctttgtatatattctctatatattttatatattctttgtacatttatatattcttggtatttttgtgtgtgtatatacatacatattgcatatgtgtgtgtgtatatatatatatagcatatatatgtgtgtgtatatatattgcaattctttctcccagcctgtgatttgccttttaattatcttaagaatatcttttgaagaccattaaaaaaattcaatgagttttaatttatccattttcttgtttatagtccatgcttttaatgctctattaaatagctctttaccaaagtcactattttttactgttatattctagaagttttatggttttaatcctttcatgtaaatctatgatccatttgaagttaatatttatatagggtgtgaagtaaagggcaaggtttatattttgcataaaagacaagaaaagacagtttccacgatgaaggtcaaagctggtcccaggaggagctgcacaagagctaatccatccagtgtaaggcaaacggtagaggactccaggaatgacagttccactggaaaatcaatagaattagtagaatatctgatgtatttgactatgtggaatgagtgttacctttttggtaaaaaatttgagagaagaataggcatggtggtgcatacctgtagtcccagctacctgggagtctcagacaagagaattgcttgggcccaggagtttgaggctgcaatgagctatgatcacaccattgcactctagactggatgacagagtgagaccccatctcctaaaaataaataaataaatatgtgttaagaatttaagagaagaatcaatgatagatatacggaaatagctatgaatagacaattattaatgctaaaggaaacaacatttacaagaaacactgtgtgatcttagtatacaatatgataaaactgagtataatgtcttcttagcgaagagaagaagactattgattaaaccacagactgtcatataactatattgaggaaatggagaaagggaaatacctctgtatgggcaacagtgaataatgttattatgtgtatgttaaatcatttttttcatggaagaatgggaagagatattatctaattgaaaaaaataagaaatattaatgtgacttttttttttagaaaatatagacataaatagcaaaaattaccataaaaaagaagagagtgtttgttagggtgtggatagacattggtgcatgtaaggggtagaccaagaatgtgattttgtttttgtttctgttttcgtgttttttatttttttttttgtaagtcacataatagtattaggttggtgtaaagtaattgcagcttttgctctcacttttaagccatttatatgaatacttttaacacaaaaaatttaaaactatgagcaaatataaattagaaacttttaaaaaatcccaacagaaatacttgataataaaggagattctttccatgatttttatatgttttctataaataaaagaaaacagatgggtgagatacaaacctaaaataattacatgcttatacaaaactgattgtcaaagaatgctaaagagctagtttttaaacagcagtttctaacattttaagttgatgcagactctgtacaaaaccacagtaagattctgagatttattttttgtgctcattgacaacaagcctcaatattttgcagggttcaaaaggtcaccaaaatgtttattattatttcactataacttgaagggaatactgttcaacagagaaatctaatatagaaaagaacttttgatgattattatactagtaacaagaaacttttcactactataattttcagattttttccctatctacaaatatgtattggcaacttttggtaaaactgttaagtcttaatttcgaagcaaactttttacatcataagggattgattctatgtgaaaagagacattaaatgttaatatcattaaaatagttaataagacatttgaatttacatttgacgtggctagtattctcactgaaataaatcacatgaaaatactaaatggattagagggtacagattcctcctatcgtcagttaagttattgaacctaattacacgaaagagtctttggaaaaaaatcaaacttctgcattttcacattagcaaattatttctgaaactttatggtaatgctgttaaaatccatttatatatttgtcatttgaaaatattgaactgtttcaatgagaccagtatttttgcaattttttttttcaggcttaattcactttatttttcttgtataaaaaccctatgttgtagccacagctggagcctgggtctgctgcacgaagactctggtgtgggtcttgacgaggtggtcagtgaattcctgacagggagacttggtaaatacagtctccttccagaggtcgggggtcaggtagctgtaggtcttagagatggcgtcaaaggtggccttggcgaagttgcccagggtggcagtgcagccccgggctgaggtgtagcagtcatcgataccagctatcatgagcagcttcttgggcacaggtgcggagacaatgccagtgcccctgggtgcagggatgaggcgcaccagcacagagccgcagcggcctgtcgccttgcaagggacggtgtggggcttgccgatcttgctccttcagtagcctctgcgcacggggacaatggagagcttggccaggatgatggccccacggatggcggtggccacctccttggagcacttaacacccaggccgacgtggccattgtagtccccgatagcaacaaacgccttgaacctggtgcgctggccagcacgggtctgcttctgcaccgacataatcttcaaaacctcgtccttaagagaggcccccaggaaaaagtcaatgatctcagataccttaatgggcagggagaagggatagatctcctccagggatttgatcttcatttccttgaccaagcggcccagcttggtgacgggtatccactccttatcctcggccttgcctccgcgagctccgcggcctcggccccggccccgtccactgctgctaccccggccccggatgccactgccgaaacctccgcggaagccaccgcggttcccaatcccagggccccgacggccaccagggcctccgggttccaagctgcacctgcgtcatccgccatttagtgttttctaggagaagaagttagttttgcaatttttaaagcctcaaatatcttgcattttttctgagaaacaggtgagagtattaaaacactatttcatttgtatgttcagaattaatttggctactttgttgcaatcaatagagatatgtcaaggtcagaaaagcaagaaaatgggaaaaattctgaagtaccacatagtcagtcctcctggggaagtgaaacgttatttaggaccaaggcttcttctcaagtcctgcctggtcagtccctaaaaaaaggcatccaggcccggcgcggtggctcacgtctgtaatcccagcactttgggaggccgaggcaggcggatcacctgaggtcaggaattcaagaccaacctgaccaatatgatgaaaccccgtctctactaaaaaaacaaaaattagcccggcgtggtggcatgtgcctgtaatcccagctactcgggaggctgagacaggagaatcgcttgaactgggcaggcagaggttgcagtgagccgagatcacgccactgcacaccattatgggcaacaagggtgaaactccgtttcaaaacagacaaaaaaaaaaaaaaaaaaaaaaaagcatccagtcctcctcaccctagaactccaccattaaaataattgagctgtttctttttgatgtgctgctggattctgtttgccagtattttattgaggatttttgcatcaatgttcatcaaggatattggtctaaaattctcttttttggttgtgtctctgcccggctttggtatcaggatgatgctggcctcataaaatgagttagggaggattccctctttttctattgattggaatagtttcagaaggaatggtaccagttcctccttgtaccgctggtagaattcggctgtgaatccatctggtcctggactctttttggttggtaagctgttgattattgccacaatttcagagcctgttattggtctattcagagattcaacttcttcctggtttagtcttgggagagtgtatgtgtcgaggaatttatccatttcttccagattttctagtttatttgtgtagaagtgtttgtagtattctctgatggtagtttgtatttctgtgggatcggtggtgatatcccctttatcattttttattgcgtctatttgattcttctctctttttttctttattttttgctagcggtctatcaattttgttgatcctttcaaaaaaccagctcctggattcattaattttttgaagggttttttttgtctctatttccttcagttctgctctgattttagttatttcttgccttctgctagcttttgaatgtgtttgcttttgcttttctagttcttttaattgtgatgttagggtgtcaattgtggatctttcccgctttctcttgtgggcatttagtgctataaatttccctctacacactgctttgaatgtgtcccagagattctggtatgttgtgtctttgttctcattggtttcaaagaacatctttatttctgtcttcattttttatgtacccagtacccattcaggagcaggttgttcagtttccatgtagttgagcagttttgagtgagtttcttaatcctgaattctagtttgattgcactgtggtctgagagacagtttgttataatttctgttcttttacatttgctgaggagagctttacttccaattatgtggtcaattttggaataggtgtggtgtggtgctgaaaaaaacatatattctgttgatttggggtggagagttctgtagatgtctattaggtcctcttggtgcagagctgagttcaattcctgggtatccttgttaactttctgtctcgttgacctgtctaatgttgacagtggggtgttaaagtctcccattattattgtgtgggagtctaagtctctttgtaggtcactcaggacttgcgttatgaatctgggtgctcctgtatttggtccatatatatttaggatagttggctcttcttgttgaattgatcccttgaccattatgtagtggccttctttatctcttttggtgggcttcatccctgggatgcaaggctggttcaatatatgcaaatcaataaatgtaatccagcatataaacagaaccaaagacgaaaaccacatgattatctcaatagatgcagaaaaggcctttgacaaaattcaaccacccttcatgataaaaactctcaagaaattaggtattgatgggacgtatctcaaaataataagagctatcgatgacaaacccacagccaatatcatactgaatgggcaaaaactggaagcattccctttgaaaactggcacaagacagggataccctctctcaccacacctattcaacatggtgttggaagttctggccagggcaattaggcaggagaagcaaataaagggttttcaattaggaaaagaggaagccaaattatccctgttcgcagacgacatgattgtatatctagaaaaccccactgtctcagcccaaaatctccttaagctgataagcaacttcagcaaagtctcaggacacaaaatcaatgtacaaaaatcacaagcattcttatacaccaataacagacaaacagagagccaaatcatgagtgaattcccattcacaattgcttcaaagagaataaaatacctaggaatccaacttacaagggacgtgaaggacctcttcaaggagaactacaaaccactgctcaatgaaataaaagaggatacaaacaaatggaagaagattccatgctcatgggtagggagaatcaatatcgtgaaaatggccataatgtccaaggtaatttatagatgcaatgccatccccatcaagctaccaatgactttcttcacagaattggaaaaaactactttaaagttcatacggaaccaaaaaagagccctcatcgccaagtcaatcctaagcaaaaagaacaaagctggaggcatcacgctacctgacttcaaactcaactacaaggctacagtaaccaaaaaagcatggtactggtaccaaaacagagatacagatcaagggaacagaacagagccctcagaaataacgccacatatctacaactatctgatctttgacaaacctgagaaaaacaagcaatggggaaaggattccctatttaataaacggtgctgggaaaactggctagccatatgtagaaagctgaaactggatcccttcctcacaccttatacaaaaattaattcaagatggattaaagacttaaacgttagacctaaaaccataaaaaccctagaagaaaacctaggcattacctttcaggacataggcatgggcaaggacttcaagtctaaaacaccaaaagcaatggcaacaaaagccaaaattgacaaatgcgatctaattaaactaaagagcttctgcacagcaaaagaaactaccatcagagtgaacaggcaacctacgagatgggagaaaattgtcacaaccgactcatctgacaaagggctaatatccagaatctacaatgaactcaaacaaatttacaagaaaaaacaaacaaccccatcaaaaagtgggcgaaggacatgaacagacacttctcaaaagaagacatttatgcagccaaaaaacacatgaaaaaatgctcaccatcactggccatcagagaaatgcaaatcaaaaccacaatgagataccatctcacaccagttagaatggtgatcattaaaaaatcaggaaacaacaggtgctggagaggatgtggagaaataggaacacttttacactgttggtgggactgtaaactagttcaaccattgtggaagtcagtgtggcgattcctcagagatctagaactagaaataccatttgacccagccatcccgttactgggtatatacccaaaggactataaatcatgctgttataaagacacatgcacacgtatgtttattgtggcactattcacaacagcaaagacttggaaccaatccaaatgtctgacaatgatagactggattaagacaatgtggcacatatacaccatggaatactatgcagccataaaaaatgatgagttcatgtcctttgtagggacatggatgaaattggaaatcattattctcagtaaactattgcaaggacaaaaaaccaagtactgcatattctcactcataggtgggaattgaacaatgagaacacatggacacaggaaggggaacatcacactctggggactgttgtggggtggggggaggggggagggatggcattaggagatatgcctaatgctaaatgacgagttaatgggtgcagcacaccagcagggcacatgtatgcatatgtaactaacctgcacattgtgcacatgtaccctaaaacttaaagtataataataataataaaaaaataaaatgattgagctatttctaccctgcttctattttctagccagctaattaagttagcgtgattgataaagacagtctttatgcaaaaatagacagacctgtggcacctgaccagattgtatgcttttagccagacactctaggaaaaccattacaggcagcctttgagtcaagctcttggatatggtcagcagtggttaaggtaggaggattacaggatactaagcatggtgacctatgggcaaaaaagggagcaaacaaaatggcagatgctttctcataaactaagagtttaagagaaaggaacatttaagacagacattttgctcatcttgcctagtatggaacttctatagcctttaaagaccagttcaaatgcaaatgctttctagaatttctccttaggccaggcatagtggcttatgcctgtaataccagccatttggggggtcaaggcaggaggattctttgagctcaggagtcagagaccagcctgggcaacatagggagacctgcatctctacaaaagttttctttaaatattagctggatgtgattccagctacctcatgagggctgaggtgggaggactgcttgagcttgggaggctgaggctgtaatgagctaagatgtggtgccactgcagcctgggtgacagaaggagaccctgtctcaaaagaacgaaaaaacacacacacatccccaaaaagcaactctccttgatccctgtcagaatcgagaatcaatgagttagtcctgagtacatctaccacatgtttttatgcctctatctccatcttagaattgtttattatttatactgtaaccacttgtaggttaaaggatgatgctccaaagcacaaatctgtagagaccctgggaatttctcccaggtcatcatcaaattgtcccaaatgcttcctgcaactccttttacttgtctacttttctttacatccattgtgacatttggattgacattatgttaattcaaaatgccattacatcttttttttatcatgtattaatttaatgcaacatctcctagccattctattttcctctagaagccattctactctccttatactaaagtgctcatcgtaataagcaaatcaaaaataatgccactgctttcttaaagcttttcaattattccaagatacatttctttacggtatcatctaggtctgtgtagagacagatctttactttttccagtctcagctctcaccaaaatcttgctcatacttgtctagctacagaaatttcctcttttactaaaaacaattttattgtggtaagaacacttagagatctaacctcttaatagattttaaggtgtaaaatacagtactgttgactataagcaaagtgttgtacaacaggtctctagaacttattcattttgcgtaactgaaactttataccctttgattagtaatttttcatttcctccttcccactggccctagcaaccaacactctaatctctgcttctatgaattcaactattttagatacctcataagagtggaattttatgtatttgtctgtatgtgcttggcttatttcacttagcatcatttcctcaaagtttttccagttcatcatatattgcaggatttccttctttaaaaggctgaataatatttcactgttcatatggtccaagtttgctttattaactaataaatttatgaatttatcatttctagagcattcctcattagagacaccctcttccattacactacctttcacagagcccctgaaagaagaattatatgggggtgtgtgagtgtgtgcgcatgtgtgtgtatatgtatatatgtgtgtatgtgtgtgtatatatatacatggatacatatatatgaccattgatggaaaacctttatatatatatgtttttcaaaatatataaggaacttctacaattcagtagcaaaaaagccctaatatttcaataaaaaaatggctgaggacttgcatagacatttctccaaatatgacacataattgggaagcagatatatgaaaaaatggttgacttcactattcatcagggaactgaaaatcaaaacgcattatcactttatatttgttaggatagctattataaaaaaagataagtataggtgacaatgtgaagaaatcataactcttgtacactgctggtagaaatgcaaaatgatgactctgctatggaaagcaatataaggattcctcaaaaaattaaaaataaaactatcatataacccacgatcccacctttgggcatttatccaaaaaaaatgaaatcacattaaccttgttttcaccactcattcttaccatagtccctcctgcaatgggacctgtgcacattatatgttcctaccggtaatgagatttttctctcatattaacgaagtaaattcctcttattcttttggtctcagcgccaccattacttcttttggaggctctgtgaaatgtagtgtgccaagagaggtctctgtaaccagaaacactgtggaaatgataaagtaattcatggatttattagttaataaagcaaatgtggaccagctgcataacttctcaaagcatccgcttccttgtctataagactagaataatacctactttataggattgctttgaaagttataaatggtcattgcctagcagagttctagcatatgtcatggctcaataaatgcagcacacattattttttttaatgatgacactactcttgacaacataattcagaacaaaactgctgttaaaattgtgttctattgtgtttgtggggatagaacctacactactctaacaagaacctgccaaataaattgcttcatcaagatgaaagtcaatttcattcttaaatctaaccagcttggaaggcatcgcagggtggttaggacaatttatagtgttgaagatccagaatgcttgctcagtaatctttggggtgttacccttgtctgcacaaagatgaccacacccacaggaacacctcccgcttatggtcataaatcaaaaagttgcacatactgctttcactaacatttccctggcccaaacttaaactcagtcatttggtcatgactaccagcaaggaagagtggggcatgtctttacctgggcagtcatgagccaacagaataattctattactatagggaaaaactggagaagaaatattgagaaaacagatagtagtttccttcacagcttctgaatttaaaggctttaaggtaaaataatgtcttaccaaaatgtaaaaaaaaaaaaaaaaaaaaaaaaaaaaaattagggttgagtttaagaagcaagacagcaagacagaggctaacaaaacattatttttttaagttaagtcctcatataccataattttgccaggaaaatgaaagacaatagaaacagaatcacattaagcttatgaatgaaaggactccaaggttcaggatactagtcttattcccactggggcacctgagagaaatttaagctgtaggctataagagatgagtcacagtagatggcgtaataagcaatattgagaaaaaaaatgcaagcaaaagaaatagagacttttttaggaggaagattgtaattttaaatagagtggtcttgaaaggtctcactgagaagaggacatgtgagtaaatacctaaagaaagttaaggagcatgaaccatggatatacaagagaagactatttcaggataaaagcagcaagtgcagatgccttggtctaggagtgtgcctgaccttgttgagaaactgcaaggagacctgtgtggccagagaagtgagtgaggaaagaatacaacgagatgaccccaaatgccatcagagaatagaaggatcaggggtgggggagagccagagtgtaaatgacctcctaggccatccttgggactttggcatttactctttgagatatgggcacccttagaagcttttgagcaaaagagtgacatgactgaatttttattttaacagagtaataataccactattaatagagcctcaatttattgaacgttctattcttggcactataacaagttctttatttacatcacctcacttcattctcacagcactgcaaaatcataatttatacccccattttaccagataaagaaactgagtcttgcaatggttgaataaattaatcagattaataaatgacattcttgggatttttgatcttaagtatatctgcctgcaatgtccttactgttatttatactgttttatttctatcggtattgtgatagctcacttgaaaggtttatatgttattgtctcaccataaaattgtttctcattatattctgtccactaatatcctaaatagatgtgataaagaggtattctgctgtgtcattatgaagagtagtgttacttatgatagcaattattgctcattagcatttgataaaaacgagctctgtgccactgcactcctaatctaaatggagcatcataaataataaaccctcacaattagagtagagcttctgaactcatctcctttttaatctcaataacgaggcatttaaatttataattaatttccatagttttatgagcttttctcaactctcttctctccctcccctccaaatcttactctttttttttttttgaagcttccctccacagaagttgacttttctgattttcatctgtccccgcttgtatggcccccacacaagtcaggcacagcagtcagtgtacatgggagtgccagtcaccagtgaatattcagagtgatcctattctctttaccatcaccaccactctcctagctgaagatccaccattaacttctgtggggctcaaaacaagagtaccaatggaggcccacataccttacatctatcagattggtgcaaaagaaattgcagttttagaccatgaactaagctcaaacacatctttatgaatcaaaataagaacaattaaaatcaacacacttttgccaatgagtaatgaatttgtttatttccatagtgtgaaaatctgtgctttgggattcaagcaactcttggaaagcattttctacatcctgatggtcgtggaagtgttttccctgcaaaacgttgtcgagatgcttgaagaagtggtagttagttggcgagaggtcaggtgaacatagcagatgaggcaaaactccatcgcccaattcattcaacttttgaagcgttagttgtgtgacgtgcagtcgggcgttgtggagaagaattgggccatttctgtagaccaatgccatctgcaagcattgcagtttttggtgcatctcatggatttgctgagcatatttctcagatgtaatggttttgccaggattcagagagctgtagtggatcagaccagcagcagaccaccaaagaatgaccatgacctttttggtgcaagtttggctttgggaagtgttttggagcttcttcccagctcaaccactgagctggtcattgctggttgtcataaaaaatccacttttcatttcatatcacaatccaatcaagaaatggttcattgttgcatagaataagaaaatacaatacttcaaaatggcaatttttaaaaattttcactcagctcaaaaggcacccatttattaagctttttcacctctccaatttgtttcaaatgccaaatgaccatagaatggttgatgttgagttctttggcaacttctcatgtagttgtaagagggtcagcttatatgattgctctcaattgtttgttgtcaacttccgatggctggccactatgctgctcatcttcaaggctcttgtctcctttacaaaactttttgaaccaccactgcactgtacgttcattagcagttcctgggccaaatgcattgttgatgttgcaaagttgtctctgctgctttacgacccattttgaactcgaaaaagaaaattgcggctgggcatggtggctcacgcctgtaatcccagcactttgggaggccgaggcgggtggatcacgaggtcaggagatcaagaccatcctggccaacatggtgaaaccccgtctctattaaaaatacaaaaattagctggtcgtggtggcacacacctgtaatcccagctactcgggaggctgaggcagaagaatttctacaaccagggaatcagggattgcagtgagccaagattgagtcactgcactccagcttggcaacagagctagactccatctcaaaaaaaaaaaaaaaaattgctcgaatttgctttttgtccaacatcatttcaatagtctaaaataaacataaacagcaagtagtgtcgttagcaaaaaaccataaatcaagaaatgccaattaaaatgatgggcataactacatttatttaagaatgtatttcaatatcaaacagcaaacaccaacaatgcaaaaactgcaattacttttgcaccaacaaatgttacagatcatgcaaacaaattgttaagtaaaatatattaaatatgtccaccttaacgattgtaagaatttaccttcagtcctttaaaatttttttctgggcccatcttttgtttgcatttgagtgttttatttattttaatcttgatctcagactatataccttctcagtgtaaaataagaaattaaaaaaataaaatggaattatattcaaagcatacttattttattatatattttattaaaatatgacttaagggccacaaaaatgccctaataatggaatagtatggagaaatgaggatccactatgttatagaggttttaaaaataagtaaatgcaccaataaataaaatgtaagttaaaataaatgaagaaaatcctaaggtattttcataaattttattttcttttctttttttttgagatggagtcttgctctgtcacacaggctgcagtgcagtggctggatctcagcccactgcaacctctgcttcccgggttcacgccgttctcctgcctcagcctcctgagtagctaggactacaggcgcccgccaccacacctgactaatttttttgtatttttagtagagacgggatttcaccatgttagccaggatggtctcgatctcctgacttcgtgatccgcccgcctcagcctcccaaagtgctggcattacaggcatgagccactgcacccagcccacaatttttcatatagaccttctacaaagttattttatctaaatattcaaatgtattaaaattaaaaaacaaaatacaaattataacatgagagatacatattttatatcttaattctattataacacaaactaccaatagataccagtgtcttaaattatgttaattaaactaaaattttagttgattaatttatcaactcattaaatagtctagaaaactaaagccattgacaattgtagccctcaatgtccatctggttgtgaatataaatatagtcaatcctcattatttgaggattccgtgtttgcaaattctcctacttgctaaaatctatctgttgccctgaaatcaacactgcttttgcagtcattcccagacttgcctatatataaaaacgcgagcttcctaaggtgcaagttcccaactgagctcaaacaagtcgaagctctgccttcttgttaaagccttcatatgtaaataagaatccttttggtgatctatgtagtatcacattttttgcattttgtacttttagttggtgattttttgctatttaaaatggcccactcccaaacgtaatgttgagtgctctctagtgtgcccaagcacaagaaggctgagatggtccttcttagcttctatcaggacaaaatgcatgtatcagatttgctttgttcaggcacgagttacagtgcatttagccataagttgaatgttaatgaactgagaatatacattaagtaaggtgtgtttaaacaaaatcacataaaacaaggtatgtattgattagttgatgaaaatgctgtgaccagaggctcttgaggaccttacctcagatttacgtaggacccattattcagcatttgcttgttcagtgctgaaggcaactttatggaacagaaatactgtagataataataattaaatacaatcagtatcacatgttacacattatgtctatacctgcctatatacaaatttaaaagtaatttgaaatatgtgatactgcaaaatgtgcctcagtcagccactatgtgaaactgttgctaatactacatttagttttatatatttctggagccatgaatcaaagcatgaaaagaagtgtaaaagtagacatgcaatgtgagaggaagaatttgaaaagtaacttgtcttttttcttacataagcatttctgctcagatcctcttcaaactcaaaagagatcccatctctggcaatagtagtggcctggattgaaaatctttacagtattccaaaactatcacctttgcttttgatgacacaaggcaagagataaatacatgttttcctgaggtctggaagggtatttatcataagaactaacagtaacatttacaagtccttttctgtcaacagtagaatctaaatttaagtgataaagatgtccagatctttaatacatttctttagagacaggcagtggctttctaaactgtggcacccggaaaaagaacccctcttgtcctaaaggcgaaaatacctacaggactattctaacttcatatacttgcgtacacaacagggcactaagtgacttccagaatcatagactctgttaggtctctctccccattcctgagtatcaggcatgcgttgtgtcttacataaaatgtaaactctttagcacttaaaagacttaatgaaataggttccaacccctttttcaatcacattttacaaaactcccataatgtctactcccaatccttaatgtatgccttgaatttccttaccttcttggtttgattttgctctccaggtttgccagcccagaatctttgtccactctttttcccaatgtccaatcctatcccttctgaaggcccatcgagaatattgtttcaggacaacttttccattttctatcagctataaggagtcattcctgcctcaaaaatcccatgccaatacttcaacactttctttatagccatgaacagtgtctacatagttaattgtgcatgtttttttgcacgatgtaaattcctttaagacagagtcctgtctggtttattcccatagccccacagcacagtactttttcagttaatgtttgttgatagaaaaagaaatgacaaaagtaatgagagaatgactttcagttgttgtttaaatgaacagacttctgcctggctctgacatcattttatattggaaatatgtaaatggcagaggattttctattatcagatcccgctcagagtactttgcagcatcttgagctggtgtgcccattcttgttccatcccatcttcaacatgtgggtaaaatgcctgacttcataactgttttagaaggcactttgacagctatcagaggccagtaagcatttcacatgttgaccaaatattttcacatcggaaaatctatcttaaggtaatccagtataaacaaaaagccttctataaggcataaatatttaacattatgtctaacagactgcatgtctaaaattaagggcagaattaggaaaatggtaataattctacatgacagaaataaatgtggatttactacggatgagagtaaactgaaaagcttaataaaagtacagaaaactatctgcaaaataatgttaaatgacaaaaaaagatatttatttttaaaagtatgattatggcaatgtaaattccattgataaaagaaagtgtgaaaggatatatacagtggttttattagttgaaagaggagggaatttttttcctttcttattttttgaattttgagaagctttatataaaattaaatgaacttactgtgactcaaaaaattttctatgactaacaatatggatgaagttagcactgaagaactgctctgcacattcttatgaaataaaatagtaaacgatattttgtgcttattttggatttataatgtaacttataacaatggtcatggaagggtctaataaaagattacacaaaatgtgacaattagaaatcaaaaccaaagtagaagtatcttaaaagttgctaaaaagttaacgcctcaatacccttgaaataaattttatttttaataatccaacttgaaatcaagtcaaacctgggttagaaaagtaaatatgcccagttacatagattttcttaccactgttttataaaaattgtggttaaagtatacaaaacatgaaatttactatttccgccatttttaagtgtacagttcaatggcattaaataaattcacattgttgtgcaaccctcataaccatcatcaccattcatatctaaacctcttttatcttcttcaactgaaatcttgtacccattgaacactaactctccattcatttgaacccccagaccttggaagtcaccattccactttttgtctctatgaattctattctaggtacctaatataagtataatcatacaatatttttctattgggttactgatttatttcacttggcataaaatcttcaagattgagcccagttgaagcacatgtaacaatttcctgccttttaaaggctgaataatattccattgtatgcacataccatattttatgtatcctttcatccactgatggacatgtggggagctcccactttttggctattgtgaataatgctctgtgaacaagggtgtgcaaatatctgtttgagttctgctttcagctatttttggtacgcactcagaagtggaatttttgtaccatatgataattttatctctaattttttgatgaactgccataacattttccattcccaccagcaacacacaagcattgcagcttcttcacatccacacaaacatttgttattttaattttttgataatagtaatcctaatgggtgtgaagtcgtatgtcattgtgcttcggtttggatttccctaattattagtaatggtaagcatcttttcatgtacttgttggacatttgcatatttttttaacaaatatctattcaagttctttgcccatttttaagttgggttgttatttatttgttgttgaattataggaattctttatatattctggatatcaattccttatcagatgtacaatttgcaaatattttccacagttctgtgggttaacttttcactctattgttattgtcctttgatacacaaatgtttttaattttgaggaagttcaacttacctattttgtttttagtcacctgtactttaggtatcatattttaaaaattaattgcccaattcaatgttatgaagttttcccttgttttattaagtttaggtatttggttaattttgaatattctttaaaatatggtataaggtaagagccgccaccaccgtcttcttcctcctcttttttcttctgttacttctccctcacttttcttctgcccttctgtttctcttcctttttcttcatgtgtatatgcagttccaccaacaatatttctttgtccattcttcattgactggtcttagcactgttgttaaaaattatttagccatatacacaagggtttatttctgggctaattattctattccattggtctttatgtatctttttatgccagtaaaacagtatttttattatcatggcttggtagtaagctttgaaattaggatgtgtgagacctatacgtttgttctttttcaagcctgttttggctattcagggtcccttgagattccatatgaattttaggatggatttttcatttctgaaaataaagccattgaaattttgataaggattgcattgaatctgtaaatcaccttgggtagtaatgatgttttaacaatatgatattttccaaactatgaacatagaaggggaaaatggccatactgcccaaggtaatttatacattcaatgccatccccatcaagctaccaatgactttcttcacagaattggaaaaaactactttaaagttcatatggaaccaaaaaagagcccacattgccaagacaatcttaagccaaaagaacaaagctggaggcatcatgctacctgacctcaaactctactacaaggctacagtaaccaaaatagcatggtactggtaccaaaacagagacatagactaatggaacagaagagagccctcagaaatgacgccgcatagctacaactatctgatctttgataaacctgagaaaaacaagcatctgatctttgacaaacctgacaaaaacaagaaatggggaaaggattccctatttaataaatggtgctgggaaaactggctagccctatgtagaaagctgaaacaggatcccttccttacacattatacaaaaattaattcaagatggattaaagacttaaatgtgaggcctaaaaccataaaaaccctagaagaaaacctaggcaataccggtaattcagcacataggcatgggcaaggacttcatgtctaaaacaccaaaagcaatggcaacaaaagccaaaaatgacaaatgatctaattaaactaaagagcttctgcacagcaaaagaaactaccgtcagagtgaacaggcaacctacagaatgggagaaaatttttgcaatctactcttctgacaaagggctaatatccagaatctacaatgaactcaaacaaatttacaagaaaaaaaacaaacaacccatcaaaaaatgggcaaaggatatgaacagacacttctcaaaaggacatttatgcagccaacagacacatgaaaaaatgctcatcatcactggccatcagagaaatgcaaatcaaaaccacaatgagataccatctcacaccagttagaatggcgatcattaaaaagtcaggaaacaacaggtgctggagaggatgtggagaaataggaacaattttacactgttggtgggactgtaaactggttcaaccactgtggaagacagtgtggcgattcctcaaggatctagaaccagaaataccatttgatccagccatcccattactgggtatatacccaaaggattataaatcatgctgccataaagacacatgcacttgtatgtttattgcggcactattcacaatagcaaagacttggaaccaacacaaatggccatcaataatagactggattaagaaaatgtggcacatatacaccatggaatactatacagccataaaaaagatgagttcatgtcctttgtagggacgtggatgaagctggaaaacatcattctcagcaaactatcgccaggacaaaaaaccaaacactgcatgttctcactcataggtgggaattgaacaatgagaacacttggacacaggaaggggaacatcacacagcggggcctgtcctggggttgggggagcgggtagggaaagcattaggagctatacctaatgtaaatgacgagtgaatgggtgcagcacatcaacatggcacatgtatacatatgtaacaaacctccacgttgtgcacatgtaccctagaacttaaagtatataaaaaaaaattagttgggacctggtaaattgatttcatgactcactaatggtttgtgacccaaagtttgaaaatcactgagtaacaggacaaaaaaaaaattaaaatgtaaaaaataaattctgggactagtgaaaaaaagaaaaggatatgttttcatttatttgtgtctcctttcatctctttcagtaatattttgtagttttagtgtataagttttttgccttcttagttaagtttatttctaagtattttttcatacatgtttaaggtgtacagcatgatgttttaatatacatatgccttgtgaaatgattactatggtcaagcaaattaacatatccatctcctcatattgttaccttttattttttctgtaagttgtgtatgtgataagagcccctgaaatctactcttggcagatgtccattatgcaatgcaatagtattaactagtcgtcatgctgtacattggatctctggagacttattcattctatatcctacatcactacaactttgtactctttgaccaacatctccccatgcccatctcacccctggtaaccataattctagcctctgtttctatgtatttgaattttttagactttctatataagtaaatgtatgcaatatttttatttctgtgtctggcttatttcacttagcataataccctggttcatccatgctatcttttttacactgaatatctcacaattttcttctgttcattcatccattagtagagccaccagcatcttttagtttctatttgcatagaatatctttttccatcttttcactttcaaactgttcgtgtccttcaatctaaagtaagtttcctgtggaaagcatatagttgtattcttatatttattttgaaacgtaactatacctatctatttttatataaaggacaaacagatcttttggaaattggagtcgactcactgtgtaaccacagggtataaaaataagactagtgtagaaaagctacgaaccactggctttaaattctcactgccagatcagcagtgtagaaaggattgaggggcacacatcaatctcaatatttgaaaaaattttctaatgttctgttttatctagcaaagagtaggtaggcgtgtgatgtgttaaagcagatgttggatatacatgaacacctatcacacacacaaatttggattgtgtgaaaaaatatactagaagaactcttagttttcttatatttaattaaagatggcagaatatggattgtagataaagatagaaggataaagcataataattctatttaaaaataaataaaaatagttaaacaactcagcaaagttatttactagtagctgtgaaacaagaaaaggaattcagccttatgccattaatttaggaaagtgataaccaaagaaagaaacaggagattctaatcaagtttcctaatgcttttcccacagtccaaatctgagacaaaaaaaaaaaaaaaaaaaacaaacaaaaaccaactgtgagaatacaaactactggccatcaatttcaaagtaatacaagaaataggaaaaataaatgcccaccatctttctagaaaccactttgaagtgataaactatcagaagcccaactatccctgcctcctgaagtaaagtaaagctacaactgcagagtgacaaagactgaactgaggtatagaatgtttcacaaaatatcagggtccacctctggttctttcttccccttaacaacattgcctcccatgacacactgaagttacaagaaagtgaatagaaagcaatactcaatcttacaactgtatatctgaggggaatataaattaatctgaaacaaagtggaaaaaatttcaaagagtttccactaacaaaacttcaaagcaaagaaatgatctgaacaaagttgatcatattaaagagaaacagagtggcttctgctgccagagtcacaaaataactagaatgtgcccagaaaataaagctcctttattgtttataactaagctgttcattctcataactcccatgcactaaatagcttgcgttggagtggggaaggtagtaagtatctaatagaatttaatgcttcatcagatccaaaattgtaatagtccatatcaggtagtattcagtctttgagatataaatctctccagtggcctccccattcccatcttccgatgaagaaagaagaaggatgtgattttttgactgtatggcactaagggagagtcggcatactcaggcctgatatcttctatattttctggtttagagtcagtttctcttattcaccttgatattgcttgcccggatgatgctggcagctttatgaagtctacagttgttgtaacctacaacttagtatttttagactttattaagacctactagaattgaattactaatttggtagttattttaatggctttacttgttaatttcattaaccatgtcatttctggatccgtttccgttggtggatttttcttttggttatgggttatacttttttatttcttttaatgctgataacttttggttgaatgtagatattgtgaattttacattttgggtcctgaattaaaaaaaatatatatatgtataacatatatgtataaatgtatacatatttgtgtgtgtatatatatatgtgtgtgtgtgtttgtgcgcgcatgcccttttcctttctggaatgcaattatttccaatctgctggatcatttggaggattgttttcagctctgttagaacagctccagagtagttcttagtccgtggctaatttaaccctattactaagcaatatccttatgagaactctgtctgacgttccatatattaggattaggagttctttccactgtggatgatgagaatagggactattcctatttttgcatgagctctgggactgttccactcacaagtgtacattggtattcaaacaaagcctcaaggggaaccctccatggatctccaattctctctctctctctttctctctctcttctctctctttccctctggggatcttagcactttttatctggttatttcacctacaaactttgtttctttggcctcctccaactccaaactttgttttcttagtccagcaaggccaccaagctataaagtcttcccgctctctgtacggtgtccagaaaactccaggcagtaggttagggcaatcacagatcctaccttctttatgtccttcctctcagggacccatctcttaaaatgtctgttgttctatgtctgaagacaattgtttcatatatttgcctagttttctaattgttgaacagaaagagtaagtttatttccttactccttaatagctagaagagaaatttaagccttatttctaattatggaataaaactggatttcctctagaaaataaatttcaggagcccatgggcagatgagaaaagtaatatttgatttttggttgttcttttaccccaatttttatagattgttagttatatagggtttcatataaatatcagcctagtttgtcttccagcagggccatccttctgttctgttccttacagttactgaaacattgtgtatggattactgaccatcctagttcgtggtcttctgtaactgagatgactcattattgtgctattgaacaagagagatctgaatgctataatttggttctaattttcatcatgtttgttaattgatctgcttcagaagtgcaaaatagaatcacttggtcaacatttttttttaaaaaagacatgcagataggaagggccaagatggctgaataggaacagctcctattcaggagctaataggtctgcagctcctagagagaccaacgcagaaggtgaatgatttctgcatttctaactgaggtacccagttcacctcaccgggattgtttaggaagtgggtccaacccacagagggcgagcagaagcagggtggggcttggcttcacctgggaactgcaagaagccaggggacctccctcccccaggcaagggaagccatgaaggactgtgctacccggctgggttactatgcgtttcccacagtttttgcaatctgcagatcaggagattctctcgtgtgcctacaccactggggttctgggtttcaagcacaaaactgggtggctgtttgggcagacactgagctagctgcaagagtttttttcataccccagtggcacttgcaaccccagtgagacagaaccattcactctcttggaaagggagctaaagccagagagctaagtggtctcactcagcagttcccactgccacggggcccatgaagcttgaaattctcgctgacagctcagcagtctgaaatccaccggggatgatcgagcttggtgggggaagggacattcgccattattgaggctttggtaggcggttttcccctgacagtgctaaggaggatggaaggtttggactgggcagaattcaccacagcacagcaaagcaaagtggctgtggtcagactgcttttctagattcctcctcactgggcagggcattctctgaaagaaagctaacagccccagtcagaggtttacagataaacttccatctccctgggacagggcacctggggaaaggggcagctgttcacacagcttcagtgaatgtaatcgttcctgcctgccagctctgaacagagcagctgatcctggcaagatggattctcccagcactgagcaccagctctgccaagaaacagactgcctcctcaagtgggtccctgagccccgtgcctcctgactgggatagacttcccaacaggggttgacagacacctcatagaggagagctccggctggcaactggccggtgcccctctgggatgaagcttccagaggaaggagcaggcagcaatctttgctattctatagcctccacaggtgataccctggtgaacagggtctagagtggacctccagcaaactgcagcagacctgcagaagagggacctgactgttagaagaaaaactagcaaacagaaagcaacaacatcaacatcaacataaagaacccccacactaaaaccccatccaaaagtcaccagtcacaaagatcataggtagataaatctatgaagatgagaaagaaacagtgcaaaaatgctgaaaattccaaaaaaccccagaatgcttcttctcttccatatgatcacaactcctctccaacaaggacacaaaactggatggagaatgagattgaccaattgacagaagtaagattcagaaggtggctaataacaaactctgagctaaaggagcatgttctaacccaacgcaaggaagctaagaaccttgataaaatgttacaggaactgctaactggaataacccctttaaagaggaatgcaaatgacctgagggagctgaaaaacatagcacgagaactttgtaaagcataaacaagtatcaatagcctaatcgatcaagcagaagaaaggttatcagagattgaagatcaacttactgaaataaggcgtgaaaacaaggttagagaaaaaagaatgacaaggaacgaacaaagcctccaagaaatatgggactctgtgaaaagaccaaacctatgattgattggtgtacctgaaagtgacggggagaatggaaccaagttggaaaacacacttcaggatattatccaggagaacttccccaacctagcaagacaggccaacattcaaattcaggaaatacagagaacaccactaagatactcctcgagaactgcaatcctaagacacataattattagattctccaaggttgaaatgaaggaaagaatattaagggcagcaagagagaaaggtcaggtcacctacaaagggaagcccatcagactaacagcagatctctccgcagaaaccctacaagtcagaagagagtgggggggccaatattcaatattcttaaagaaaagaattttcaacccagaatttcatatgcagccaaattaagcttcataaatgaaggagaaataaaaacctttacagacaagcaaatgctgtgagattttgtcaccaccaggcctgccttacaagagctcctgaaggaaacactaacaagggaaaggaaaaacttgtatcagccactgcaaaaacacaccaagatataaagacctataacactataaagaaattacatcaactaatgtgcaaaataaccagctagcatcaccatgatgagatcaaatgcacacatcacaatattaacgttaaatttaaataggctaaatgcctcaattaaaagaaatgggctggcatattggatatagggtcaagacatattggtgtgctgtattcgggagacccatctcatgtgcaaagacacacataggctcaaaataaagggatagaggaatatttaccaagcaaacggaaagccaaaaaaaaaaaaaaaaaaagcagggccttttggtttcatatggaaccaaaaaagagcctgcattgccaagacaatcctaagccaaaagaacaaagctggaggcatcacgctacctgacttcaaactcaactacaaggctacagtaaccaaaaaagcatggtactggtaccaaaacagatatatagaccaatggaacagaacagagccctcagaaataataccacacatctacaaccatctgatctttgacaaacctgacaaaaacaagaaatggggaaaggatcccctatttaataaatggtgctgggaaaactggctagccatatgtagaaagctgaaactggatcccttccttacaccttatacaaaaattaattcaagatggattaaagacttaaatgttagacctaaaaccataaaaaccctagaagaaaacctaggcattacctttcaggacataggcatgggcaaggatttcattactaaaataccaaaagcaattgagacaaaagccaaaattgacaaatgggatctaattaaactaaagagcttctgcacagcaaaagaaactaccgtcagagtgaacaggcaacctacagaatgggagaaaatttttacaatctacccatctgacaaagggctaatatccagaatctacaaaggacttaaacaaatttacaagaaaaaatcaaacaaccccatcagaaagtgtgcaaaggatatgaacagacacttctcaaaagaagacatttatgcagccaacagacacatgaaaaaatgctcaccatcactggccatcagagaaatgcaaatcaaaaccacaatgagataccatctcacaccagttagaatggcaatcattaaaaagtcaggaaacaacaggtgctggaaaggatgtggagaaataggaacacttttacactgttggtgggattgtaaaatagttcaatcattgtggaagacagtgtggtgattcctcagggatctagaactagaaataccatttgacccagcaatcccattactgggtatatactcaaaggattataaatcatgctgctataaagaaaaacacacatgtatgtttattgcggcactattcacaatagcaaagacttggaaccaacccaaatggccatcaatgatagactggattaagaaaatgtggcacatatacaccgtggaatactatgcagccataaaaaagatgagttcatgtcctctgtaggaacatggatgaagctggaaaccatcattctgagcaaactatctcaagcacaaaaaaccaaacaccgcatgttctcactcataggtgggaattgaacatgagaacacttggacacagggtggggaacatcacacaccagggcctgtcatggagtcaggggagggaggaggaatggcattaggagatatacctggtgtaaataacgaattaatgggtgcagcacaccaacatggcacatgtagacatatgtaacaaacctgcgcgttgtgcacatgtaccctagaacttaaagtataataatatataaaaaaagatttaggcatggacaaaaacttcatgactaacaccaaaagcaattgagacaaaagccaaaattgacaaatgggatctaattaaactaaagagcttctgcacagcaaaagaaactaccatcagagtgaacaggcaacctacagaatgggagaaaatttttacaatctacccatctgacaaagggctaatatccagaatctacaaaggacttaaagaaatttacaagaaaaaaacaaacaaccccatcaaaaagtgggcaaaggataggaacagacgctcctcaaaagaagacatttatgcagcagacaaacatatgaaaaaaaaagctcatcatcaccggtcattagagaaacgcaaatccgaaccataatgagatatcatttcatgccagttagaatggcgattattaaaaaatcctgaaagaacagatgctggcaagactgtggtgaaataggaacactttacactgttggtggaagtgcaaattagtttaatcattgtggaacacagtatggcgattcttcaaggatctataaccagaaatgccatttgatccagcaatcccattactcggtatatacccaaaggattataaatcattctactataaagacacatgcacacatatgtttattgcagcactatttacaatagcaaatacttggaaccaacccatatgcccattgattatagtttggaatgtggcgcatatacaccatggaatactatgcagacataaaaaaaagagttaatgtttttgcagggatatggatgatgctggaagcaatcatctacagcaagttgacacaggaacagaaaaacaaatgccgaatgttctcacttataagtgggagttgaacaacgagaacacatggaaacagggaggggaagatcacatacggggcctgtcggtgggtagggggcaggggaagggaaagcattaggacaaatacctaatgcatgacagattgataggtgcagcaaaccactatggcacatgtatacctatgtaacaaatctgcacattctgcacatgtatcacagaacttaagtaaaattcttattttacttaaagtaaaataaaatagacaggctctttatctcagaagaactgaacagatagcgtttctaaaagtgagtctgatggagtccacaattgggaattattttattttattgattgtatatatataaatatatatatatttttttttttgagacggaggcttgctctgtcgtcaggctagagtgcagtggcgcgatctcggctcactgcaacctccgcctcctgggtttaagcgattcccctggctcagcctcctgagtagctgggactacaggcatgcaccaccatacctggctaattttttgcattttagtagatacagggtttcaccatgttggccaggatggtctcaatctcctgacctcgtgatactcccgcctcggcctcccgaagtgctgggtttacaggcttctgccactgcgcccggcccacagttgggaattaagtgtcctgttgatcactagtctacttgtcagagatatgtttgaatagggatttccatactataatcaaaaaggtgctgatattattgtgtgaataatcataatatacattctcagagactgaagaatgattattttgtgtaatttttatatttaatcattttattcttctcttgaagcctagtgtagaatatctactaacttctttttttacttgaatactagggaactcacctttcccacatcagactggaaaacagagttccttcataaaaaccttaattggccaagagataaataggattccttcacggagaagtagtagaacaggagaaggaaaatgaggagaagaaggtgaaggaaagggaaaggggaagggagagaggcagagggttcatttatttgtggacatctcacatgtataatgattcggttacagattcatttattcatcatcttgctgggcttggtgctacaggtagagatttgattgaaatttaatcctcactagcagacaggtatccagtcaaacaagatcagtggattggtaaaagtcagtgagattaaaggtggccctaacaaaaaaatgtcacctatcactaagaacaacaacaaaatcttaaaagtgtctactctgagtcacccaacttctgagacaacttgtgtcatttaacacattttacagtcaaaatagaaatgtgtcataagctctaaatacagcaacgacaccggtaccaacacagatgtttatttcagatcttttacactacttctcaaacatgtaccttttctttcagcagcctcaaagatgttataattggaagaaaagtactttgcaattactgttttgaagttttcacctctgggacagttttctgttgtaggtatgtaacttggaagttatagaaagataccatcttaagaacttaagattgtactctgctatgcaacaggcagtgagcaaaggtaaagatatgagaatataatttaaagagacaaagagactctcaggtcagagactttccaaaaatagatgatggattgtattttttttttaaattttcaatgtgaagagaaggctaacttgcctcaaaggaagcaacatagaaataaatatgccattgtccaccccaaatccacctaggagaagataaaactttagttagcaaactttacgattaaggtgctgtaagctgaatatttgtgtccctctcccaaaacttatacattgaagcctaatcctcaatgtgatggcattataggtgaggcctttgggaagtaattaggtcatgtggccggaaccctcataagtaggattaatgcccctactcataaaaaaaggagaacacaggagatctctctctgctcgttcccatgacaggatacaatgacaacagagccatttatttgcatactgggaagagtgctcccactagacaccagactgcctgacactttgatcttcgactgcacagtatccagaactgtgagaaataaatgtttgttctctaagccacccagttgattgttagttgttgtagcagccagaaataactacaacctaagattctttttagtgagatgagtgtattaggctattaaacaatcaagttacctaattcttctattctgtctttaagcaatattctgaacataatttggattttcacgtagatatgtctacaatgagaaagtgtgttaatcatgtgaacttttggacaatttttcatgttataaatcaatatgttttcattatatctcaatacataaatcctatgagcttagtttaatatgagacattgattgagaaacaagtctactcttcatgagaagactaaattaggtttctgagcccaaaacaatgaacaaacaaaaaacccgagagagtgacctagtaaactcaccaagctctctgggccatagctaagtagatgacatataccactcaatatgttttacagtttccaaatttctttaatactttcttaaattgtaagggtagaatggtcaaacatgttattttattcattcatatttacaataccctattttgtcttgtctaacacatgggaaaaattgaacacaactctgcttgctagctgcttttctaaaacaggggatatagctaagttcagggagataccttcaaaatgtgtcacttaatagaatacaacatggatgaatcttcaaacattatactaagagaaaaaagccagaaacaaaaggccatatattttacaatttcaattatatgaaatgtccaaaataagcaaatccataaagagagattaatgtttgctagagtctgggggaagggagatgagggagtgacaattaatggatacatggattttggggaggagtgatgagaatgttctggaaatgtatagtcatgatggtagcatatctttataagtatactaaaaaccactgaattagacacattaaacaggttaagtttttggcatgtgaattataatctcaatttttaaaaatgctaataggggccatatgaaggtagttggatttcaaattatttttacttttacccttcgtatagattatttattttttaaatgaacgcagtctgggatgaacaatagacagctttcatgagtgtgggggacctagctgaaaatcaggccacttagagattgtaatataaatatctgactgttaatgccatacatacctagaaaagtaaaacattaaaattccattttaattctcttcagctggcattggttattatcagcaacatgctaagtacagagttgtgtaaatctttggtcccactttatatgaaatggacttgtatatgttgatatagatatttacctgggattagtaaaatttaagcctttatgaagttgcccatttcttcaataaatatttcttcagctattatatgagacttgagttactatatgacatgaactgtgtcagttacaaaacccagtgtgagcaaacactaagttcttcccccaaatgctccttagaacaagggtcacagatgaaaaattagactggaaaatccgttaaattgacctaccatagtattcacacaacttttcattcttaatgtaaatgtaaggaaaatgcaagatttctttttcttttctttccaacagcccccagtttacacagacactagtagtagatgtgggaaatacacacttgggtgactataacctatttacaatgagagaaaaatcttcagggatgagttaacatgttttatagtgttaattacagaaagtgcaatactaataatgttcaggagttaattaaccactttctgaacttcactcgtcttgtctcacacacttggcagaggccatcaaagtaataatctgtatcaaagactcttatctactttgaggtttgcagaacttctttgagaatctctttatgtcttttctttctaataaatgcatataagcacatttaaactgaaaactgcagaaatatcaaggttttaataattatcttggaaaccatccatacattcctgaaacctcagagatcttaggttacaattaattcacttatatgaagaatgtcttattaatatagattaatacattttagttcattcaattaattaaatgttatccattataaaatacttagaattgtctggcttacagtaagctgtcaatgagtgttagatcttttatttttacagcatatgttgagcatatcatgtattaggcactttcttaaatgctagattaataatatataacattttctatgtttactgtaagacagacatatatttaatacttttaattaccctatgcagtatatattttcgtgcttactgctttaagatgaagaaactggctgtactgaaattatcttgcccaaagccagtagggcttatcatcaaatctagtactttactacgacttctcttcaataccagtagagaaacggtagggcttgtattcaaatctattgcttctgattccagaacccatccttttatttctgtgatattccattgttagcagatttcactcaacctatgaaaagcttgtctgggatgattcactcacatcacccaggtgaacatatatctcttataggaagaactttcagttaatatcaactcagatcaaagctaaacctagagagaggcaaactccatagttgaagtaaacgacatgacataaatttgcattggcagagtgcttaaagtgctaccttttcaaaagtaaaagagtatataaattatcataaacttcttttgttgaatgaactctcccctcattcacctcactagaaaaggctgaatatttgaattcctataattttaatatcaagaatcctagtgcacatttaaaaggttatacagtttgtgaaaggaatgagactttgccccttgcttttgccttatgatggtgtaagtcaaaggtgctatagtttaaaatactcttggttaaatctcagatttgggcttgtgcatttaaattctagagatattattaagactgttggtctccttaagaatcaagacaggtttttaaaacttgctaagatgtttgattttaaatacttcttagatgaaaaagtaccagagtctaaaatgttcagatctagaaaaaaagagagatttgtttaccagtacatgtttgaatttttaggaaaacaaaaagattcatggagatatggcctttaatcaagctatgtttccaatgcagatgaaactgaagtgcaaatgcaaaaataagctggcttgtcaatcatagctagtcgaatcaccaggggtgtgaaacgtttggatttttggattttaaagggttagacaaagacgggatagaaacttgctgtgttgaaaaggatactgtttttggaattttcagactttttgtccttactgttaaaataaacagcatcgatggcactcatttctcctactccttcttcctcctcttaaattaagtttagcctcaagctgcctccttacatattttaagtttggcctaagggtttttctgtacatcgtgaactataaccagcagaggtataaacagaccgttgcctacacttgggccaatcagcgagttttggccaaatagccaactattccaaccatgttcaaatatggcaaacactgtaaccaatccagcaatttctatacttcacttctgttttctgtacctcactttcctttttctgtccataaatcttccaccacgtggctgcactggagtctttgagcctacttgggctcggcaggctaccctattaatgtagtgttcatggctcaattaaactcctttaaatttaattcaactgaagtttttttcttttaacactcctcagcaaaaaaacatttgtaatgctccctgcctcaccagctaatccattcttatcatctggtattctactggacattatatttttaaacagtcactaggagaaatacacttgcaaatagctagttgagactgaaaaatgatcgaagaagtttaaatctgatgagactcctagggaaatacctattagaagcatgtgcatgggttgagggagctaagagaagtcatagtaagaaacacagtaatggccagtcgtgggtggctcaggcctttaaccccagtccttagggaggccaaggcaggcagattacctgaggtcaggagtttgagaccagcctggccaacatggtgaaaccccatctctactaaaaatacaaaaattagccaggcatcatggtggacacctgtaatcccactactccagaggctgaggcaggggaatcacttgaacctgggaggtggatgttgcagtgagccgagtttgtgccactacactccagcctgggtgacaaaacaagactgtctcaagacaaaaaaagaaaaacagtaaaacctatggagacccataattacaaagaagcatgctgacggtatatagctggtcaaacaaacaaacaaacaaaaaacagggaacagggagactcaggaacatcttattctgaattctatattcttcccacgctcttcatagacccaactctaacaaattgtttttgggaaaccctttattcccccaaggctctgagttattttagaaggagtgtattagattcacatttggctacttagagacagatgtatacatccatgttacttaaatgttgacaatctgcaatgcgaaggcttgaagcacgcaaaaaatacttggtgtctgctctaaagacagagccaatacgatagctccctaatgatggtggcaggggcccatctggggtggccactgtgaggactccagctgcagtgggggaggtgcgaccagggctgtgcgctcggtgggggctggtaactggtgatcccagtgggagccccataccctactgagttggcagggagggagtccttgcctgcaggtgcagctacagctgcccagctgcagctccagacccaggcatccctgcactcttgggagctcaggaagccctcttcccctgcaggctcagaagtgcctgctcccactcacaaaccttttcctgctcctggtgccgactccagtgcagagcaaagttatggctaagcccgagggctgtcacagcctggccgggtgtgcgtgtacttggggcagcactgacgtacaagccccctgttcccttggccccttccagactttgagcaccgacaagtgtgggagggaggctgaggtactgagggcagcttgtcgtgggcctgtgggtgcccctcagcaggaacagcctgtgcactgtggatgtaatgttgatggcagcgggaggcacacagattcttaggagggaaggggcaggtccccagtgaaaccccaccttcaagccagggagaggttgaagcttgggggccaggctcccagttccaggtggggttcatgaccaggagtgagaacttcattgatgtctttcagccagtcagatggtgctttttccaggcctgcctatgtctgcctatggacaagtcagcatgcgcttcctccattctgagcatattaagaaccccagactcagccagagtcagacacttgtcaggatgaccagcctgcagaaaggagctacccacttcaggtctcctgagagccattctgtcactcaataaagctctcctccttgcttaccctccagttgtccacataaattcattcctcctggacatgggacaggaactcgggaattgacaaatgcagggagtgaaaggaactgtaacacattcctggccagctcgctaagctgcaggtggcgacacagtcctggactgcaggagtgaagagtggcaacccttccggggcccagaccttagaatacccatggccagaactgctgtaacactatatccctccaccagtgctgggtggttgccccacaagacaggaagcagcagcggtacagggtcagcccaagagctgtggccagagtgggacagtgggactgagagacctgtaacacaaacaggctgaaacacatccccccaaaactcgccccctcactcaccaagctgtgggcaataataaggagagaagagctgtggcctttctgggagcccagacctcggggctccctaagtcagggatgtgacatgctataacactctctttggggctctgtggttcctggcatctctgagtttttgggtgccaccatcttttcctcatccagatgctggtgcctgcagcagaagcttctagtggtacatctggtccagcctcagccttgcacaaagctggcacctggaactacctgccacactacagcaggcagtgtgcctggctgtgctcagtgtccagaccccatgctcgcttgctcacacaccccttgccactccccacctggctcgtggcatccaggccagtaacgcgagctgagtacagcctgccaggccaagtcagcataacaagcccagcaggcaagagcaatactcaagcagaaggtgccactgcccacagaggtttccagctggcgaagtgacaccctaaggatccaatgacactactatacaagttgcaggaacatgagaacactttccttctttcatcttgatttgtccttaaatctagttcagtgaaaatgtgcatggcaaactgccttccaccatgaaatctgctaaacgagcaccctgttcccattagttactgaacacacacacacaagcgcacacacacacacacacacacacacacacacacacagagagagagttattcttctcatctatcctaaattttactgacctggggcacagtcccagaatataaaacctctagctttcaaacaaagggacaattcaatgacacacagctcctgagagaaatttccattaaaaaaaataaaagcaaaatgagcccaggtaggtaagagattatcagagggtagtgccatatttcagccagctgataaatatatggcagcactgtaggtcttatctacctatgtctcctagaattgagtagtgaggagttgtcaaggagatgcatattaacacatttatctgctttgacaaatgaaatcaggtatagtcagtgagaaaattacgctgatttggctgaatggttgtccagtaacctctggtttttctatggtgaatattttctccatggtgaatattttccacaaactgaatgaggaaaatctactgttcaaaactttgatgaaaatgtatttaacaaatataaacactaggttgggaaataaacatgacaattttcaaacataaaattagatgataacttaaaaatgtgtgaggggcctagcagttatttttaaaatatcttaggatgtgtataagcaaaaaaaaaaaatgtgtagacaatttgcttgtaccaactttagaaccctagttagacctgaaatctacaatttaaaaataatggtaacggataccttttcagaataacatgcatctatcattcttggaatagttaaagcaacaggtatatttagctctttaacttacagaagagctgttatgggacatccagaagctaaccttgattattttaaagattattttttcaggaataggattaatcctccaaatttttctagaagacagaactagagtcagtaggctaatcactttcaagaaagcagatttcatcttaatataaggtagagctccctaaccatgagcactgtccaaaaatgtagtagatttccaactctgaacatgtctagcacaggctagagacacactgggtaggaggaatataataagctaggtcatttctagctttcagacataaaataatgtagcaggtacagtgactcactatttattgaacttggccttaaatcttaaggaaagtaaatctaactcttcttcttaggaatggtcagattttctgtactttctgatgatcttgtagtggagaataagtgaaattcattttctttagcatgtggtaatgactacaagcaaataaatttgatatttatgagattcatgtagaggccccaaagtattccactggggagcttgagattgaattattcatctactgcaaaggaatcacacaacagcaaaagtaccaggcagcataatttcacaactccttttatttctgtcattgaagagattttccaagtttagttttctcctgtttcaggtaggtgtactatttattctacttccttgaaacaaaaattcacagccaacatcatcacaaggcatctctgttcactttactttaactataaataaactctgctatctgcagctccttggctgccacctctggaaatgttgccacaactggtcctcactttccccttcagcttcagactctctctgtctgactcttttggtgttttattctctcataagttattttcaccattttttaaaataaaagtgatacagagaaaggggaaagaagaagaaaggaggaagagacagaaaatgactcaaagttaccttccgtttttaagaggtctctttgcatggataaactgaagtcataagttgtgtgtccttggatgatgctttaatatcattagttttttgaaaatgaagagaatcctgagttattgcttatgtttatacaaataaatcccatatttcacatctgtcactaacttactgacttaattgaatgcgtatcagttggtatttaagggccaaagaactgtaagaactgatgtcatttattgaatcaagcaatgggttattgaaattcctgtagccctgttttacgtgctagggatgcagaagtgagcaagatccatgtcttctgaggctttctgtctagtgagcaggtacactaaatgtgtttttatcagaaacaaaatctatgttgaaatcagggaaaaaacacatggtgtaagtaactcctgattctgttaagttgaattacgtgtactctgttgtaagtaaagggaaaatactcacctgccctacccggtggtttatgctcattttgtctcatctcatagagagaaagtgtgtggtggttgggagaaaaaatgaactggaataggttgaacttgagtctgagttttatttttaacacttactaactgttgatccacagtgctctcttttcctcttccttctttctttacatgggaacagtaatagatatgtcacatagtcatgataacttcatgagacaaaacatgcaaaacacatagtagtagagtgctttggaccgagtaggttgttaaaaaatattgcttctaatttttcttccctttaccttcttgttcttacctggccaccatgaaaggcagacatggagactcattcagcactgcaagtgggacagtttgattaggcttatttctttttccttcatcataaacccaatgtgtacactgtgaagtacacaagagacaggagagcacaatacaaaatgattacctaattttaagcgattctttcaacagctttctccacagctcattttaaagtttgtggggttttttttttttcactttcagctcacaaggactctaaccttgactaaatgcttatgtctgcacacttattagcatcacaggggtccattagaaggcctggtccctagagaaggcagggaggcacctgttagattgttactattaggaatgtttatttaacaagaagtgtggaggttatcgtgttgcagagagacacctgtttcaaggtcaagccttctgactgtgggcagcgtgaatccagtgattggctgatatgggagcaaaaaggtcttgcccccttgagggaaattaagacaagtctgaaggaacatcgtaagcaggggcggctgaggccgtattgtaatttcatcacagcccaacttttcctccacctcgtgtttcttccttctcctctcccacaggtgttgcttgaggggacacattccagtaagtttttgtatgcactaatcactatctcagaggctgccttcttgggaaagccaacctgccatgaggagtcaggtattaactgtcccactcattgacatcaagtgccctgctcagagtcacagtctagtgtcaattccataactcaaaagcccatggcagtctattaatacaatggaatattccacagcaacaaaaataaataaatactggctgtacataacagccagtatttattttgagtcttatgaagctgtgattgagacacagaagctgagacaaaagagtatatttgtatcatgcccagtaaaatgtatttctctgggaaaactttctatttaaaaaataggaaaaacgaatctgaagtaccagaatacaaaatagtgattatgcttgaaaggggaagtaaagattaggaaggagcaccagggggggtgtcctggtgctcataaatgttctgtttcttgatctgagtgctggctacacagttgatctgagtgctggctacacagttgatctgagtgctggctactttatgaatattcacccaacgatacacataatttgtgtgcacttttctgtaaatagattatattccaataaaatatattttaaaaagaacaaaatatgtgtacttgataatgtaaccactagataaataaactgattccaaaatttaaggctacacaggcatttcatagaatattcctcatgcttatcataagccaggcaaaaatcacacaagcaagaagaggcaagcattcagtattagatggttttgtatgctgcagaatcatttaaatatatgtcccacaaaaaaatttcctccttctttatgatgacaaattattatggcctggcaggtgataactgctgaaatatttagaaggcacttaagatggagaaaaaaaccctacaaatgctatttgaaatccctttaaagaaaatttctctccgaagagcagaaaaacaaagagggcaattgatggcaatttatgacatgacaaaatcaattacagtcatgcgccccataaagacgtttcactcaaccacagactgcataaacaatggtggtcccacaagattataatggagttaaaaacgcatattacctagtatttactatactttacttcttgttgttattttacaatgtactctctctgtgtgtatacatatacatatttatatatataatagtgtatatatctgtcatatatatatatacacagtatatataaacacacactctgtgcatatatatggaatgtatatatatatgtcatatatgtgtatatatatacagtatggatatcagagagcgagagagagataaagttagccatgtaacagcctcaggcagcttcttcaggagaaggcactgttgtcacagcagatgacagattcatacctcttattgcccctgaagaccttccaaaaggacaggacatggaagccaatgttatggtgatgatcctggccctgtgtgggcctaggctaatgtgtgtgtttgtgtcttagttttttttgttttttcaaatatttaaatagaaaaaaattaaaatagaaaaaaagcccatataatttaaaggaaacaaagaaagaaaatgtttttgtacagctgtacaatgtgttttatgctaaatgttattacaaaagaattaaaaagatttttaaaggcttataaagtaaaaagttacagtgttatcataagctaaggttaatttattattgaagaaaacattgtttttataaatgtagtgtagcctaagtgtactgtgcttataaattctacagtagtgttcaataatgttctaggccttcacattcactcaccactcactcactgattcacttagagcatcttccattcctgcaagctccattcctggtaagtgccttctacaggtgtaccactttttaatcttttataccatacttttactgtcccttttctatgtttggatttgtttagatacacacatacttacctttgggttccaattacctacaatattcagaacagtaacatgttgtacagatttgaaacctaggagcaataggctatgtcatttattctaagtgtgtgataggccataccgtctaggtttgtgtaagtacactctgatgttcacacaacaatgaaattgcctaaggaggtttctcgtgatgtacgcctgccattaagtgatgcgtgactacagcttcttattggattgttttgcttttagagtgaataccttgaagataacaaactcacttactttttatgccacaaatatatcatgtagcattgtggctctgcaagaatgaaaattgtaacaaagttgcttcttgagtaggaaaaacaactataaactggcttcaatgtgatattgtgatgtaataagaaataaatatctgatcttagttgccagttctcaggtagagttcctaaaacccttgtaatttcctaagtgataaaggtaaaaggagcatcttctgtagttcattaacaaaatccctttcaaacacacatgagtttacgtgaacgagatgacttttggaaatcccttaaaggtaggagatagttacccgggaaaccaaccatatagttagaggattgaaactttcagcctcaccctccaaaccacagggggagaggaaagagtactggagattgagtgaatcactagtggccaataatttcatccagcatgcctaagtaataaagcctgcagaaaaaccttaactgaaaggatttggagaatgtccaggttgctgaacatatgaaggtgctgggtgggtggcttgtccagagagggtatagaagccccatgccccttctccatattttgccctgtgggtctcttccatctggctgtacttcagttgtattcttaatagtaaaccagcaaatggaagtgaatgtttccttgagttttgtgaacccttctgtgaactccataaaaaaagaagaaaatcctgttatttgttgcaacatggatggtcattatgttaagcaaaataagccaggcatggaaaggtgaatcttatatgtcctcattcatatgtgggagctaaaaacgttgatctcatggaggtagagagtccagtagtggttaccagagactgggaagtgggaggaatgaaaagaatttggttagtgggtatgaagcagagttcaataggaggaataagttctattattcaattgtacagtagggagattataattaatgataatatattgtacatttcaaaatatctagaaaagagaaaaattggaatattcccagcacaaagaatgaatacatatatgatattttagctatcccaattaccttgatttggtaattgtacatgtacattgggtacatgtatgaaaatatcacatgtaccctatgtataactattatatatcaataataaataggtactcaaatagtttttatatggcataattttcctgcagagttggaaatggtcgctacaccctttaacctctgactatacactctcctttatgtcttctcactcatcatcttttatttttctcctccttgctaaccctggtccagctttgagggctttcttacaatccttttgattccacaaacaagccagatatgctttcaccttcatgtctttgcatttgttactccctctagttggaatgctctttcttaaatttgcaggtatttaatttcatattgtctctgtctcagtaaggcacactctattgccccacctccactccccagcacacatatactagaactcttttcctttttttaaaaaatatcatgtgtcatacatcacgtattctaagttttgtattgtctgtctcctctcttacataattacaaagctcaaggaaagcagaactttagcaaactgcttgcactgctgtgtctcctaaaataatccctactatatagtaagttcccaacagaacttgattgaataatgatttttaatagaaaatagtattaattaagctgaaatagaaaaaatgtattacctagaaattataatgaatcttataggtcaagttatagaatatcaggttctcaacaccagtgataagtcaatctgcttatatagagatgcaacacaaggtttttcagaggcccttataatctttaagattctcgcaaaggcacaaggaacttctgtgtataaatccctattaagggcggcatccatcatctcttcactgagaccacaagcctctcctggttcactaaatccctctgaggccaagcacaaactgtcccgtcaggcccatctgcagagtaaacccatgaaactagactgtacattaccagattgtgggattgctggaaatggtatgaggactgcaaccatcaaggatagccacgaaaaagtatacaatgtattctctattctcagatcaacaaactgaaagaaggtttctattcttctggtagatactcttcaaagttgacccctgtgcatcacatttatgcttttatagatgttcctgtcaatgctgaatctgtacctaaaacgtagccaaaatgtcattgtgccagttttgggtgtaagccttaaaaagaacttcaagcttccattctgtcctcttggaagccttgacttttcatgttagaagtccagctaatctactgaaacgaatgtgtagaggaagagtccctgagactacatggagagaaagggggaggaggaaggtctagtcatcccagtaccctatcctcactgagcccagccttctgactgttcatcagtgctccagtcatgggaatgaaccaacttggacatttcagccacgctgagcccccagataattgaagctcctgtccaaatcgcaacatcatgtataacataagaactcttcagatgaatacagtcgatgtataaaatcatgaaaagtaacaagaaagattgtgattccaaaacttttggagtgattttttaatgtacagatggaaaattaaaactattaaaactactactacctcatataaccaactgggatgaggaaagagagttacagggctctctttaaggggctttacaggattgtaaggcttctgtctccatctcattttctgcatctcagcttataaatggtagagagagctgaagagaaggttgggattgccacctcaacagtgattcctctgaagtcatttgtctttcgttagaacaaagattctgaattttaaacataaattctatttttttctaattatgtgactgctgctttcccttattgggaaatgctggcctcatatatcagagctcaggtaaagataaagggcaataaatgctttaaggtctgaatatggcaggaaaacaacattgacactttatacatcttcctatcacctctttagaatagacaagtgtcagaccaaatcctcctgggtcaacaaactattttgacacagaaagctgcccccacttcttacaccttggagttgatccaatatttggatcattatatcagagtatttttagattacattacaagcacggacagtatgtatccttaggcttaacataaagtataaaaaaacaactttacaataagaatttggctcgatgttttaataaaagaactaaaagatctcaggattagaagcttcactcagtaaaattcctaagccaacatcattaagtaatcagggaatcagaagtagattcttactcttttctcaaatttgcatttgctttcctttacttaatttctattctacagactctgaaataactccttcagctgattctgtcttaaaggaaataaatgtaacaatctaatctgttcatattcaaatcctagtacatgcacaaagccctttataagaaaatgtgttaaataattcaatgagcagattattattacagagaattaaataagtggatgtggtatatctctaatacccttgtgtaaagcctgttttaattctataatcccaattggatgcaacatacttaaatgaataccattaacttgtattttttctattctgtttataaacataataacagttgagagacatctattgagaaaacatcaactctatttgcacattcttaaagagaatattagaaaaacgaaattttaattttcgtgtgtgtaatctgttaatataattagaatggaagacgattatgtactttcagatctttccatgttaattaaaaagctaataacttgaatggctataaatactgaattagtggggccaatgctcctggcggttaatcctttatttgccatttactgaagatcacttaattaggataccatctttatatcaggaataccctatcaatagttgcaagggcccttaatctttgatggtagatctttgagccattttccaatacactgcactccactcgggatttcctaacagtcagcattcactgcctttgactcagtctatcaaggaattttactgtgagcaatttctctgcctccctaaccttagtaataatttccaggttttagagaaaggaaaagcagctccactagaaaaattaaaaaaaggtttctagctctaatgtttaataaacttattaatatttttaaccagaaatagtaggagtagacaatgtaagcatcaaaagattaatatcagcaattggtggatatacataaaacagtgtttgacatttttatactaatgaaaatccgtgagtacatagtaattcaaactaaatcacattagtcatctttggaggatgctagagaaccagttcattattcttagaactagcaaataaagtgaaataatattttttaaaaaattactctgactttcctttacaaactgtcgacgacaagaatcaaactctgtaaaataattaaagagatttgtcctgagccaaatatgagtgaccatggcctatgacacagccctcaggatgtcctgagaacatgtgcccaaagtgatccgggtgcagcttggttttatacattttattgagacatgagacttcaatcaaacacatttaagaaatgcattagtttggtccagaaaagcaggacaacttgaactgagggtggggtggggcatctagcttataggtagatgaaaaattttctagttgataattggctgagtttatctaaagactgggattaatagaaagggatgccgaggttaagataaagggttgtgaagacccaagttcttattagcagatgaagcctttaggtagtagccttagagacaataggttgtaagatgtttcttatcagacttcatgtctgtgttgatgttaatactggagaggtataatgaggcatgttctactcccacttctcatcatggcctgaaacaatctcttgggttaaattttaaaacagccctggctgaggaggaattccattcagatggttgggggacttcagaattttatttttggtttacaaaaccacacccaagtttccttctcaggtactcttctgggattaatatatgagtgagaaatgatagacttagactatcaccacattgcatcccataatgaggtaaaggatctaggcaataatcatcaatggttgccaaaactattaagttaaaagagggcagagcaatctgataacaccccactccattgatcaatattaatatttatatcactaagcttttactgcaatgatgttggtcaaaaagtaatttcaaaactcaatagcatgtacacacacacatttatttcttgattatgaaaaaattggatctgtgggtcaactgatgctaagcttggcttggttccaaactgtggtttgctttcaggttgacttattctgtcttcacaatctgtatcccaagaaaaaagaagcagttactatttgaaacacatgattgtcatggcagaaggcaagaattctagaagctaagccagacaatgcaaacgcatttgtagtcttggcaccgatgtgatctatgtcatctacattcacgttctataagccacagcaagccaaattgctaagttcaatacccatgtagttgggagctatacttctctcatgaagtctggggaaagggaagcattcaatggaaaaagagattctttgttaaataataatatgatctacaacatcatgtaaaaaaagagacacacgagtcatgacgtgcccatgatgtgaacaagtaagaagtgtgcaagccaacctatgaagtattctaaactattttttgtcaaactatcaatttatagaaaataaaagaagtaggggaagacgtcaagaaacgttacaaggaagcaactggcaacatctagaatgcgaagaataccacagagcaataaataattttcttctacaaattgttaaaaaaaataaataaataaaaattttaaaaaatgatgaaggagtaacatacagattgaaagatatttacagaaatctcagagaactgtaatgtgtaggctttggctggatcataagttgaacaaatcaaatgcaaaatgacattttacaaactatcagggagacttgaacaataattacctttctgataatgttaggaagtactaattgctaggttaatggtattatggttatggtttccaaatacaattgctatcttatataaatatatactgaaatatttaagaatggaaagagacgtgcttcaaagtattctgaggagagtcaggagtagggaggagtataaatgaaataagttttgagtgatgagcactgagtaaattactctattctctctactcttggataatttttacataacaaaaaaagtcctgaaagagagagaaaatttcttttcaccaaacgaagtaaagtggataagaggtggatgtttctaagatcatattttattgtgcttaaattctttgcttgaatctccctacttctgccctgtataaagatcaaaactttttcagctcaaggggataacaatgcagtgccaaaaacgaatgtctttcattgtgcattttaaagacaaaaaaattgtaaattataaagttttttttcctaagaaataaacaagagagtctcagaacctcttcccttctaaaaaaagcaagaaaatacctcaaaaacaggtatatttagacacgtctaatgaatgcttcttgagaatgaaaccagtctatgtaagcaggattatttatttagctgggtgaaatgctttttttggtaaagggaatttattttaatccattgagaactagaaattattttgtttcatatagaaaaggaaacagagccactaatcaattatattaacttttttataagtgaacgagaatgtgcttattctattaggaaaacaccaattttatttgagattatgatcaaatagcaacatattttagaagccacagagagaaaatgaaattttaagagaactatcttttcaaaagaaaacaacttgtgaatagggagctcatataatctttcccagaagaaaatgggcaatggttactcctgtgtggcatttcaacccatagtgatttacctgaaggaaattattaactcttcctggcgttttagaataataacatgatgatgagacacctaaaaagtgctcagaggaaacattggttgcaagtacctgcccaaattgtttaatgtttgtcaaacttgaattgcatttgaagggtgcatcactagtaatggatttccagttctatttccacatgggcaaagctttgtagccattacaagatgtagtttattaccttgcattatgtatgagatgatttttgtgagcaggtacacaaacacaaaagggaaaaatacaagaaagcaatttcttttattgctcaatatatagcagttaggaataatttggaaatttttcaaatagctcattttgggaaattcttagatctactcaggacagactgttttctacagtgttattaaataatttgagtgtagataagactgacattaattcctaagtgagttatctcttgttacataatagaggcaaaatgtcacaaaagggatactagatttggaaataaaagagctttgagcaatgtttctaacatgattaactgcatgtaaccttggtcatataatttaatttctctatgcttcattttcctcttctcaaaaccaaaaataatacagcctgcctcacacaattatattgaagattacatatgcctagctcaatgattactaaaaagcaaatactcaaaagtttttgattaattcaaattattaaacaagagctaatacatgtaaatgggcttgtaaattaaagaaatctatacaaatataacacaaaaacatgacagaatcattttgtttgttttataaaatttgttttcagatgtcttttaatgttttacctgatgtcttttaatgttttttttttcttattagtgaaaagactgagtgtcaaaagtgaaaccattctgtctttaaaccttgctatagaatcaaccagttcatgaaatcttattaaatagtgtcttgaacttttgttgtaagaaacaaagaactattattagtgatgctatcgaatggcttcaagatagtggtgtgttttgacatgaaaaatattgtagataaattgcaaaacgtgaagagaacttcttaggtataaaatacagccaccacaaagtgagcaactagtctcttacacaaaatgccagagactgtgcattactttttcggcacagcattgagtgtagccccattagctgtaatttatgcacaaacgagtgtaagcagaggcaatgtgtacgttctttgtgatattggcacacggttgtcactttcaatccaaaacactctcaaatctggccaatttttctccacattttggaagaatcattttcttttggccagagattcactgtaagaattttcaagcctagagagaaggttttgtttacaaattcggaagggagaaaaatcaaaatccaggcaagaatagaggagctcctgcaaccttggttccgcatggagtcacacttcaaacttcagaatgagagctggctgcactctgagaaggttaattttctttcagatgagtgaaacagttccccagttggagaacacacttctagtacttatgcatgagttctttagcagtgttttgctcagagactttagtatactctgtgagagtatacataaaaacacattagctacaagcaaggaaaggctgaaaaccacgagcatccatccagtgtacatgaaatggatggagcaaagcatgttgccacatcaaataccatgtcaggactatgtaacataaagtgaaacagcccaaatctaggtatagattatgtttcttgtctgcagattaaaaatgccagttgccgggccaggcacagtggctcacgcctgtaatcccagcactttgggaggccaaggcgggtggatcatgaggtcaggagatggagaacatcctgggtaacacagtgaatccccgtctctactaaaaatataaaaaattagccaggcgtggtggcaggcgcctgtagtcccagctactcgggaggctgaggcaagagaacggcgtgaacccagaggcggagcttgcagtgagccaagatcctccactgcactccagcctggggacaaagcgagactccgtcgcaaaaaaaaaaaaaaaaaaaaaaaaggcagacagttttgaacagttatgaggtcccagtaaaatatcattctgctctaatctttttatcttctcagggtttactatattctattttcttctatttcttttcataccagaagcttctttcataacaacatttaggctacaaactggaaacagtatggtgtagtaaaaaaacacatgggttttaaattctatgaagctcaaatcccagccatatttttgttcaaaaaaagattgtaagcttaaattgcaacagtgaagaattattgtctctgagcctcaaatttctttaaatatttgaaaattaaatgaagatattaatgtctcaaagggttttaaaattgttttaagactttaatagatatattatgaattaaatagatacattatgtgtatacatatgtatgtgtactatatatgtatatatggtatatatgcaattctatataaaatatatgtctataggccaggcacagtggctcacgcttgtaatcccagcaccttgggaggctgaggcaggtagatcacctgaggtcaggagttcaagaccaccctggccaacatggcaaaaccttgtctctactaaaaatacaaaattagctggccgtggtggcatgcatctgtaatcccagctactcaggaggctgaggcagggaaatcacttgaacccgggaggtggagatggcagagagctgagatcatatcactgcaccccagcctgggcaacagagcgagactccatctaaaaaaaatgtgcatatatatctttatatatacaaatgtttataaaatgtatgtgtatatatgtacatatatatacatatgcatttcttttttttttttagaaaaaccttttattattgagacttttgacttatgttcaggaaatgacttttatgtacaatttttttaaaaattattattatactttaagttttagggtacatgtgcacaatgtgcaggttagttacatatgtatacatgtgccatgctggtgtgctgcacccattaactcgtcatttagcattaggtatatctcctaatgctatccctcccccctcccccaccccacaacagtccccagagtgtgatgttccccttccagtgtccatgtgttctcattgttcaattcccatctatgagtgagaacacgcagtgtttgtttttttgtccttgcgatactttgctgagaatgatggtttccaatttcatccatgtccctacaaagacatgaactcatcattttttatggctgcatagtattccatggtgtatatgtgccacattttcttaatccagtctatcattgttggacattcgggttggttccaagtctttgctattgtgaatagtgccacaataaacatatgtgtgcatgtgtctttatagcagcatgatttatagtcctttgggtatatacccagtaatggtacggctgggtcaaatggtatttctagttctagatccctgaggaatcgccacactgacttccacaatggttgaactagtttacagtcccaccaacagtgtaaaagtgttcctatttctccacatcctctccagcacctgttgtttcctgactttttgatgatcaccattctaactggtgtgagatggtatctcattgtggttttgatttgcatttctctgatggccagtgatgatgagcattttttccatgggtcttttggctgcataaatgtcttcttttgagaagtgtctgttcatatcctttgcccactttttgatggggttgtttgttttttttcttgtaaatttgtttgagttcattgtagattctggatattagccctttgtcagatgagtaggttgtgaaaattttctcccattttgtaggttacctgttcactctgatggtagtttcttttgctgtgcagaagctctttagtttaattagatcccatttgtcaattttggcttttgttgccattgcttttggtgttttagacatgaagtccttgcccatgcctatgtcctgaaaggtaatgcctaggttttcttctagggtttttatggttttaggtctaacgtttaagtctttaatccatcttgaattaatttttgtataaggtgtagggaagggatccagtttcagctttctacatatggctagccagttttcccagcaccatttattaaatagggaatcctttccccattgcttgtttttctcaggtttgtcaaagatcagatagttgtagatatgtggcgtcatttctgaaggctctgttctgttccattgatctatatctctgttttggtaccagtaccatgctgttttggttactgtagccttgtagttgagtttgaagtcaggtagcgtgatgccaccagctttgttcttttggcttaggattgacttggcgctgcggactctttttcggttccatatgaacgttaaagtagttttttccaattctgtgaagaaagtcattggtagcttgatggggatggcattgaatctataaattaccttgggcagtatggccattttcatgatattgattcttcctacccatgagccatggaatgttcttccatttgtttgtatcctcttttatttccttgagcagtggtttgtagttctctttgaagaggtccttcacatcccttgtaagttggattcctaagtattttatactctttgaatgggagttcactcatgatttggctctctgtttgtctgttattggtgtataagaatgcttgtgatttttgtacattgaaagctgtcctcagcaaatgtaaaagatcggaaattataacaaactgtctctcagaccacagtgcaatcaaactagaactcaggattaagaaactcactcaaaaccactcaactacatggaaactgaacaacctgctcctgaatgactactgggtacataacgaaatgaaggcagaaataaagatgttctttgaaaccaacgagaacaaagacacaacataccagaatctctgggacacattcaaagcagtgtgtagagggaaatttatagcactaaatgcccacaagagaaagcaggaaagatccaaaattgacaccctaacatcacaattaaaagaactagaaaagcatgagcaaacacattcaaaagctagcagaaggcaagaaataactaaaatcagagcagaactgaaggaaatagagacacaaaaaacccttcaaaaaatcaatgaatccaggagctggttttttgaaaggatcaacaaaattgatagaccgctaacaagactaataaagaaaaaaagagagaagactcaaatagatgcaataaaaaatgataaaggggatatcaccactgatcccacagaaatacaaactaccatcagagaatactacaaactcctctatgcaaataaactagaaaatctagaagaaatggatgaattgctcgacacatacactctcccaagactaaaccaggaagaagttgaatctctgaatagaccaataacaggagctgaaattgtggcaataatcaatagcttaccaaccaaaaagagtccaggaccagatggattcacagccgaattctaccagcggtacaaggaggaactggtaccattccttctgaaactattccaatcaatagaaaaagagggaatcctccctaactcattttatgaggccagcatcatcctgataccaaagccgggcagagacacaaccaaaaaagagaattgtagaccaatatccttgatgaacattgatgcaaaaatcctcaataaaatactggcaaaccgaatccagcagcacatcaaaaagcttatccaccatgatcaagtgggctacatccctgggatgcaaggctggttcaatatatgcaaatcaataaatgtaatccagcatataaacagaaccaaagacaaaaaccacatgattatctcaataggtgcagaaaaggcctttgacaaaattcaacaacccttcatgataaaaactctcaagaaattaggtattgatgggacgtatctcaaaataataagagctatctatgacaaatccacagccaatatcatactgaatgggcaaaaactggaagcattccctttgaaaactggcacaagacagggatgccctctctcaccactcctattcaacatagtgttggaagttctggccagggcaattaggcaggagaagcaaataaagggtattcaattaggaaaagaggaagtcaaattgtccctgtttgcagacgacaagattgtatatctagaaaaccccactgtctcagcccaaaatctccttaagctgataagcaacttcagcaaagtctcaggatatatacatatagatttctatgtgtatatatatattttgtatatatttatatatgtgtgtgtgtatgtgtgtgtatatatatatatatatatatatacagcaaaaaactgcaattacttttgcagcaacctagtagatgtctctctctttctctctctctctctctcttactcttcctctctctgtggttctggttcttttcgcctttccaaagctactataatgtaaatcctggtcctagtttcaccactcaacattttaccaaatacagatgtaaattaaaatggtcatcattctcccagcctaagaaaagttcttatcataggaatctttcaaactaatcactaaagtaacagatctggtcattgtcctttatatgtacacacatttcccaaccagatacctagttttaaatttatatctacatgaattttaatatattttacataaacactttttcagggaaaagtgcatgcaacatgcaaaattataacattaatggtatgtctagtgtggtgcctggcatataataagtgctcaatgactgttaaatacatgatagctctttagttccactggcggggcagggtctcaaaacccatctgttttcagttaaatcccaaaagtctgactggctatttgtctgaagaatattcaaaaatcaggataaagcaaagaaaatttttaatcattacgtcctctcaaatctaaaattttgtgattctattatgagaaatagcaatcattatgtgtccttcagaacatacaaacctacaggaacataaatacatacatacatacatacctgtgtgtaacatcatctttcactgtcctcaccacaatgctaccacccacatttacataccaaaaaacaaaacaaaacaaaataaaacatctgagaataagagagttagtaaattccctaaggctcatatttgggaactacaatccttgtaggttttttaattgtattctgtgatttgctggaaaaaaatcctaaacttactctctatatctgtgcccttatctcaattcaaataactttcagaaaggccaatccataaaggttttatctaagttccagctttcttattaataagatgtgataaataatatctaccctgtttaacttaaataggttgctagaggatcaaaaattatgtggtatatataagtactttgtcaacaacagagatatagttacacatgtaccgaacttttatagtgttatcagctcacagattgaaattaatactaaattctgtaatctccattaataagatcggtgcataattaaaaattagtaggagtaatgttaaattcagtttttctctgggtaatatttaaaaatttttctcacaaagattgattataccccattaaattatcaaatagataatatagtacttacagtttttgctaagtgattataatgaataatttttattggcttgataaaaatctatccatgtaattaaggagactgataattataactcagggtaatgcccgataaaagtgagaatgttttctctcatcttacttgggatagttttgttttataaaatattatgtccaatggctgatgaaataggaagcaaggccccgatcaaaggtcccaattacaatacagatatattctaggacaacttcctgccattcaacataatttcccaccttctaatattctctttcccagaagataaattttcaatgaaataaaaatcagaacttcctggaaatatttaacaagtcatttattatgattctccaattgttttgaccatttatcgtgctaaggaaaataaaagaaaactacaaaaatagttgattgtatacagtcacatacatccatactcaatcaaatctggataaaaattcaattttggatacaaaagtttttattcagattagagaattaaataccttataaagaagtccatcactcttacattggagaaataaaaatggaaaaagagaccaaaatccagagtgagagccaaattatttctttttagaagggctttatctcatcacaccataaattcatcctccacatatcctttaaacttgtgagtgtatatggtgtgatctcggctcaccgcaacttccgcctcccaggttcaagcaattctcctgcctcagcctcctgagtagctgggattacaggtgcccaccaccacgtccagctaatttttattttatttattatctatttatagtagacaaggggtttccccttgttggtcaggctggtcttgaactcgcaacctcaggtgatccgcccacctcggcctcccaaagtgctgggatcacaggcgtgagccactgggcccagccaaaaccgcattttcaagaatcttttacaaagttgaaataatcatattacctttgaaatggtacttaatagtttgcaaattagactcatccttatttaaaaaccagagaaaaaatggaagatttggtctcttttttttctttttgcagatgagaaaatggaatttcagaaaacacatgatgccgcttcttcaaggtaaagtaagaatcaattcctgagctgacaaacctacgtgtccttactctgggtctggtgctctttatattaaaggtgtgtggcatggtggtcctcttctctctttgcagagacagtctattcagagaaacagattagaaaataaaaaaggccgggcacggtggctcatgcctgtaatcccagcactttgggagacagaggtgggtggatcatgaggtcaggagttcaagaccaacctggccaatatggtgaaaccccatctctactaaaaatacaaaaattagctgggcatggtggtgcgggcatgtaatcccagctactccagagactgaggcaggagaattgcttgaacccaggaggtggaggttgcagtgggctgagatgctgccgctgcattccagcctgggcgacagagtgagactgtatcccccccaccccccaaaataagcaaataaatgtagtaattataaagtatgaaaataataagcaacatgtactacgtgcttactctgtgtaacacactgttctaagcattttccatcaattttgtacacattccttatagcatccttatgaggtggatatgactggtagcttttatatatttaaaaagaaaccatgaagctcagagagattgaataacttattcaaggtcacagaactaggaaacagtgggatcaagattcaaacccaagaagtgacgaaagcacacagctattaaatgaaagaccagaatgacaaggagccagtcccaagaaaagcagggtatgtgaaaaccctgagtcaggaaatagctgggtgcatcaaagaactgagagatgactggtgtgactgaaatatgttttttaaaaagggagaagagtgatactaaataatagggaggactggcaagagtgaattatgcaaggtcttggatgtcatgaaggtaagttgagtgtttaagcagtgaaatgagaagccattggagattttttaaagtacatttaaaaaataatttgaattgcatttttcattcagtctgactgaaaaatccatgtttgttgaggtttgacaaccatcttattatatatttatttatccattcactcgtttacttaacaagcaattgctaaatgctgattttagtatatatctttacccagagtttgctatttcagcaatatcatgtattcaccaaaccaaatatttattcactaacactaaatggttatatctggtgttttttcaataattccttaatcctagcagcttgcacaacactaggtacgtgtagttgaaataaaaatagtcaacttgttatttccgttaaatcaaccatttaatggattttctttttcccaggatcgactggttattttgatatcatgtcctatttcttagaactttagtcttcttgctttctgtttccaggtaagaatttaaaagttattgcaaaatggtaaatatatgtttctcaagacaggcaggtatcaggctctgacaatgataaacagcacttataacattacctatagagatcacactgagacataaagttaagggtttttattcttggtataactttcatcttctacacttaacaaacaggcaagaccagccaaaaagatgagcagtctgaaatatcatatctgaagctatccaatatttggtatagcaaacatttattaaatatctactatgtgcaaaatgatatcctgaagcaccataggaaatataaatggtacgctctcatgcttgcacatctttaatgacatgaggtcttgattttacgcaattttactctatgttgttagacaataataccaaatgttatattttgtagcaaatcttcttcagaaacctaaaagtagctttcccagtaaaactgcattgtgtctcatttgtgaaatcaggagtatctttaaacgttcagcttatgaaaataaaataaatttcaaaggccacaggtgtatcaaaggatcatctttttattcacggaaccacaggatcataaaatctctgagtagaaagagacctagagggcgtccagccctatgctttcaggcttcacagtaacataagaataacctggggtgtgattttagcaaaatggattcccaggttctggcccctggagattaattcagtaggtctgagtggagccaggcaatctgtactttgtaaaagcttcccaggtgattttgatatgtagcctggtttgagaattcaaatctagcccaactcctgggtctgatatggaaatgtgttctgcactacctttccctacaagctgtcatttagtttctgttttaatatacatgggatagaaccctgactctcaaaaactgttgtagttattagaatgacatctatatatctgtatctatctgtatgtatgtatgtgcatgtgtgtgtataagtgtgtgtgaatatatgtgtgtgtatctatatctatctatatctatatctgtcagtatctgtttccaaaaatgatgctgtaggctccgtgaaggtagaagttaggactgttttctgtactactacataatctaccacttagtatagacctttatatttaggagatagttattaaggttcactgaatgcacactagattgaagttcttattagtttgatctgaagttggaaacatccatctattattaagctagtttttatagttttaggatatttaatgtctgcatgacagatagaaggaatacaactatgaataagttatcctctttgcttctctcaaagcttatttttttttaacctggaaagatgcagattcttttcacacacattcgtaagtgcaatgtcaaaaatatggaataaatgtgggagttgagataaaggaaactaactaatctgtgattgaggtagaggaaagggagctatgaatatctgtgagtactttctaagaaaaatgatgatgagttgagtcttgagggcctagcgcttgaatttttgaatgtcaacacaccttaaatcaaatacaacaaattatattcctcttctataaggtagccatgtaagtgtatatagaaagatctgtctctcaaactctctaggacaaatatccaaattcctccaaccatttctcaaatacaagtattttatatcacttttcatatttattccaatatcaaattatattaaatattctgaatcgtatcatctgaagaacattctttgaagatgagaaatatagcacatcttccaagttaaagagctatagctttagtgtgaattagaagcaaacaacactagcttgaacactgaactcctagctttagtgtgaattacaagcaaacaacactaacataaaatggaagtgaaacccagcctctccactcagcatgctaaatagagttgaaagctaaaagatggtcaacacaaatggatttaaagtgacagagggacaatttttagctttgttatcttggctaactttatagatgaatatccacaattaaaaaatatatagaaatcttatagatatctccaggtagacaaccccatttaataagcaggggaaagatggctctgagttaatactgttgtcatagaaacaattcttgcctattaaatcaatgtgaggtttggagaagtatggacttatctggataggttaagggtagagcattgggaaaatgtagaaatgttaggagacagagacactagctgtaatggtgaaataccactctcattctaaaagttaatttcctctttttaaaaaaggcataaacttagtaagatacctctctcctctttaaaaaataactttataaatgaaaatgatgcatttcatttcttcaaagagatttgggaaaatctattgaactcctctgaataactaaatcaacctcagtttgtatccccatactggaaaagtacagccccccagggtgatcagacaggtccaacagctgctagatgtctgttaaaacagtgttagaaaggcacgtatgtgatgcatatctcctgggagatctgtatctaaaatgagactagaaatcacattctcttgtataaatcaactttgacaagccccaaactgggaatatatctgtaattaataaatgaaaattacaaagctcatttcctgcgcttacttccacccaccctacccactcttgtggggctacacctgacacttattaggcttttgaaaaaaggagacttaaaataaagagaatctatcactcaacggtttgtcaaggcatgagcttttttagtaggttcacagaacaaaatgtgtaaatggtaagttccttgaaggatttctttgacataagaaatagcacaaagtgagcatgtactgcttggttctattcagttaaaaatataggggtggctttggtctctaatctggagaaactgctcatctaccaaaagctattcagggcatggccaaggctgatatcttgcatctagggccttcttgttttgacaaatgctgtatttatctcattactcaaggttcacagtggtttttggttttaagatggactagtctggcagaataaattccattaaatgagagagttaggcagatggtttctgaattgtgaattttatatcagcaaatataaaaagggattgctccaaagaagttccagactattggaattgtaaaagcacccaatcagctctctataaacaggttactgttatttttcaccaatgagaattttttttaatgtactactaaaaattaggctttgggttcccttgactagccaaattcgaccagtaatagacaccatttcttcagaaggggtgtctttatctaatgctattttgcctggctattgtcaagaaggtcagagaaacctgtccagggtagtgatgtttgaggtaggtattgaagagctcaggaaaaccatgaagacaaggaaggattattgtcagagggctgtactagtaattctcaaaatgttgtccctgcacccagcagcaccaacattgcctgggaacttgttaaacatgagaattttcagccccacttcagacttactgaatcaacaactctggcatggagcctagtagcctgtgttttaacaagccctgcagttgattttcacatatcttaatattgagaaccaccggactagcaatttgaaatttgaaagaaaatggtgtgtttgaagggctgcaatttcttccacatggctcaattttagattaagtatggatagtgggaaatcttgaggatgacaaagcaggcaagatgatgatgtgccttaagtcttcatatggaatttataccatatcattaggatgatgaggagctaacaaatgcttaaaagcagtgaattaataaggaagaacctgttaaaataactctaggagcagtgtgagaaatagactaagtccctgactggatgaggttgcaaaaaaaaaaaaaaaaagaaaaaagaaaacaagctcataattggttgggagattaaatgatatcatggttatggaagacttctagagactgggaaaggactacctaagttaggatgggctgaaaggggaagaacacaaagatctgtgtcaggattttaaagatgagtaaatgttgaagttactaaaagcaattaaaaataacaaagacctgccattttcagtaagaaaataacagaatcagttttggatttgttaactttttagttcctgcaggtgactacaagtttaggactcataattctggttatcaacaatctatctagccagctttatataaaattaaactgtaggaacaaatgcaatatactagggaaactatataaaagagaaaagaactgaaaaaaagtcctgaaattgctatgaaaacctgtatgaacatgttggagagaaagagggagtaaaaggaaacttttctctctgattttggcactattatcatggatctgctcatccattgtctgtctaaaacattactagctaagatgaaaaccctatggctagcctggagggtctagagttttcataattttgagagagacccagctttttcaaaggtaacggttaaaaaaacaaagcaaaacaaactattatgtgggctcagtggctcaagcctatatttctatcactttgggagggtgagaagggagactcccttgaggtcaggagtttgagaccagtctctgtgcaacacagcgagacctcatccctagcaaaaaaaaaaaaaagaaaaaaaaaaaaaagaaagaaacaaagaaagaaaatagcaaagcatcctgacacatgcctgtaattccagctactcaggaagctgagatggtaggatggctttaacctaggagtatgaggtggcagtgagctatgatcaggccactgtactccaacttgaatgacagagtgctaatgacaaatacagtgtattaagaatatctacatcatggccttgaaaccaagaaagaacaactgatttaaagcacaactttaagtattgataatttggggaaataaaacatgatattttttagaagacaattgcctaaagccctttctcctctccctccacctgcatacaacctcctcttgaaatgagcactgcttacttatctaatttatccagtatcctccttccaccttcttttcaaaatctaagctttactagactgactgaacagaaaagttagtttatagtagaatttatttctatagaggcccttattcctagggaaggttgtaacttgctacttcatgttactttggagctataattatgataaaattcaacagtccaaaagacaacatgcacgggtgttgctagtgagctgaacgtaaggcatcacccttactctgagcttggcctgtctaaaagtcaatgtcatttattttataagctaattcttatgcatgaaaatattgcaatcttggcaaaatatatttttgcatccgatggtcttagctgccttccagccttgcttaacaacttctaaaggacacacacaagtactgcaggggtggggggagtataagattaattatctctttccacacaatgccttttctttctctcccaattatggataatgaggccagaagtgtaattactgaaggagtttggaaaggtaattactgaactaatctcaaaaatggtggtgaccacagcacaacaaaactcactttatagctgtcagagccacttggaatgtgatacacatgttgtgtttgcaaacccaggtgctgtacgaaaggtagtttcatattagcaaattaccacaacgacctgctacattctactcattttgattttgtaatgagaaagccgattaaactgtaataactttaagttgtgactcttaaacaagttacacgttttgaaggaggtgaaaaaacaaagatggcgggtttgaggagcctttctgggatcctgttgaatatcgagtcctgagatttgcaaatagctctaccttcatctattcccactgatcactggagagttaaagtttaaggaaacttcatagcaattctcaaattaaagcactgagctttgagactgccagccaaggcctccttttatgcttaggcataaatgtacacgggacatataaattaaatttcaacgccatggttcccgttgcttctctgttacctgttctttctcgccatgatccggagagcacgccacatcctcctccaaccccttcaccctcactggcagagaacaatctctccatccctttgtgctcccgtaccattcactcctaagccctaggttctgccgcctcatctcatccctttgtgacgtagtggccccagtccgggccccggcgcgctaggctcacaaaggcaggcacagactgcaaccctgctcagtgctccgggcgcttcaggctggcttgggtcctgctgctccaaccccaagggccctggagcgctccctgatacctccatcactcaccatggccagccagttctgcctccctgaatccccatgtctctcgcccctgaaacccttgaagccacatttcggagacatccaagagggcatctacgtggcgatccagcgcagtgacaagcggatccacctcgctgtggtcacggagatcaacagagaaaactattgggtcacggtagagtgggtggagaaagcagtcaaaaaaggcaagaagattgacctggagaccatactcctgctgaatccagctctggactctgctgaacaccccatgccgcccccgcccttatcccccttggctctggcgccctcttcggccatcagggaccagcgtaccgccacgaaatgggttgcgatgatcccccagaaaaaccaaacagcctcaggggacagcctggatgtgagggtccccagcaaaccttgtctgatgaagcagaaaaagtctccctgcctctgggaaatccagaaactgcaggagcagcgggaaaagcgcaggcggctgcagcaggagatccgagctagacgcgccctcgatgtcaataccagaaaccccaactacgaaatcatgcacatgatcgaagagtatcgcaggcacctggacagcagcaagatctcagtcctggagcccccgcaagaacatcgcatctgcgtctgcgtgaggaagcggcctctcaaccagcgagagacaaccttaaaggacctggatatcatcaccgtcccctcggacaatgtggttatggtgcatgagtccaagcaaaaggtggacctcactcgctacctgcagaaccagaccttctgcttcgaccatgccttcgatgacaaagcctccaacgagttggtgtaccagttcaccgcccagccactggtggagtccatcttccgcaagggcatggccacctgctttgcctatgggcagacgggaagtgggaagacgtacaccatgggtggagacttttcaggaacggcccaagattgttctaagggcatttatgctctggtggcacaggatgtctttctcctgctcagaaactccacatatgagaagctggacctcaaagtctatgggacattttttgagatttatgggggcaaggtgtatgatttgttgaactggaagaagaagctgcaagtccttgaggatggcaatcagcaaatccaagtggtcgggctgcaggagaaagaggtgtgttgtgtggaggaagtgctgaacctggtggaaatagggaatagctgtcggacttccaggcaaacacctgtcaacgctcactcatccaggagccatgcagtgttccagatcatcctgaagtcaggacggataatgcatggcaagttttccctcgttgatttagctgggaatgaaagaggagcagatacaaccaaggccagccggaaaaggcagctggaaggggcagagattaacaagagtcttctagccctcaaagaatgtattctggctttgggtcagaacaagcctcacaccccattcagagccagcaaactcacactggtgctccgggactcctttataggccagaactcctccacttgcatgattgctaccatctctccggggatgacctcttgtgaaaacactctcaacactttaagatatgcaaacagagtaaaaaaattaaatgtagatgtaaggccctaccatcgtggccactatccgattggacatgaggcaccaaggatgttaaaaagtcacatcggaaattcagaaatgtcccttcagagggatgaatttattaaaataccttatgtacagagtgaggagcagaaagagattgaagaggttgaaacattacccactctgttagggaaggataccacaatttcagggaagggatctagccaatggctggaaaacatccaggagagagctggtggagtacaccatgatattgatttttgcattgcccggtctttgtccattttggagcagaaaattgatgctctgaccgagatccaaaagaaactgaaattattactagctgacctccacgtgaagagcaaggtagagtgaagccaatggcgagagatcaggtccgaaatgctgcattgctgcagtttccaccactcttatacaggaaaactgtccaaattatctaaagatcctcctgagaagcttaaaacatcttaaaatacactgatgggaaacatgctctttcttctgcctctgtatttctgtagtttgttttcatcctgctgaactatagttttcaacagggaatggttcctccccaccccctaccaggacatttggcgatgtctggaaacatttttgattgtcacaactgggggtgatgaggatactggcatacagtagtttgaggaccagaaatgctgctaagcattctaaagtgtacagcagcagtccccaacctttttgacaccacagaccggttttgtggaagggagttgttccgtgggtggggttggggatgaaactgttccacttcagatcatcaggcattagtctcctaaggagcatgcaacaacctatatccctcacatgcacagttcacaatagggttcatgctcctgtaagaatctaatgctcctgctgatctgacaagagggggagctcaggcggtaatgcccgctcactgccagcttgccttctgttgtgtagtgtgattcccaaaagaccacagacctaccggtctgcagcccaggggttggggaccctgaagtgtacaggacagcttctcacagcaagtgactaccctgttgcaaacatcaatggtatcgaggtagagaaaccctgctgtagaagaaaccagctgtgatgaaagcagatacactaaatttccagctgggaaagcaaaacactgtgagttaaaggaaatagattggaaagacaccaggggtacacaatggagtaaatctaatgatactgctcatgaatctttctcttgcattgctgtttagattcaaatggtttttaagatctaatcatattgggaggctggattttccttgaaaccatgtatgagagcctagaattgagagggactttttaaaagaaacatttgagttgaaatggcaaagtattgtactccctagaagtgattaaagtgcatgtgtgtaggggtgtgtgtatgtgtgtgtgcacgttttgcctaagtagggctttgttgactatagtgtctttaatttttttttcctcacacactctttaccatatattgtatttatatgcttcacataaaaagccttcctgtatcaagttggagcagggtataagacaaacagtagaaaaactcccacctaaaatgggacacatcccataaatacctcaaaagtagcatcagaaacattgataccttagattgattagataattgaaacattttcctgattcaaggatcacaaagtccattctttcttttaaaaaaaagctaatctgatacgtaaatacaaatataataaataatacgtgcagcaaactaatataattagcaaacattatataaaatactgtaacaaaaaagggtctttcggtttcaaatcttataagttccaaatgctttttaaaaagaaataaatagaaatgatttgcaaaaaagaaaagtccatggcagattaaggaaatttagacaatacatagtctccaaattttgctactctcattattttcaaatgttttcctaaaagttacaaagacctcattaacattaggataactggcacattactatagcgtagaataataatgtcctagcaaaagctatcagtgtaaaacaataaggatgaccatgaacatctggtctttcgtaattaatatttgtggtctttagaaaacaaacacacacatacacacttagcagtgctttgactggattgcattaaatcaattaacttgataaagattaatatcgttacaattgtgagtcttcaatccatgaatattcctcttggaagtttatttagttctttattaatttctctcagtcttttagcattgtccatattgaggtgtcacattcctttcattaaaagcatgattagatagtcgattagataatgtttttaaggctaatctaaattttatcacatttaaatgtaattatcaaaatattcctaatatatacgggaaaagttggtgtttgtgtttggaccttttaatgtaatgataaattaacttactaattctaatagaatttaaaatatattatgttggatgtttttaggtatataattatgggatttgtaaatgataaaagtattgtttctctccttccaatttttataccttttattcaaaagtatatacttttattatcttattcccataagaccttgtatgtaatgttgagtagaaaaagtcataacaagaattgtctggttccctatctcaaagaaaatattttaatagtttagcaattaatatagtttaatggttcaatttttatgcatagaccaatcttgtcagattcagaatttctttatatctagttattgttaatgagtgctaaattttaccctgtcttttcttcctctatttagatgaccatatgatattttcctttagtctctaagtgtaatgaattacaataccttttcaaatgttagatcaatcttgctttttgaaataatttcaacttatacttttttatacattgttgaattagaaataataataattagtttaggatttttgtatctatattcatgagagatgctataattttcttttgatatctatctcagggattggaattaagatttgccaactctataaaacaaaatgagaagcctattctctttttctattttctgaaatcattcggattttttttttttttttgaggtggagtctcactctgtcaccaaggctggagtgcaatggcaacaccttggctcactgcaaactccacctcctggattcaagtaattctcctgtctcagcctccagagtagctgggattacagctgcttgccaccacgtcaggctaatttttgtatttttagtagagacaggttttcgccatgttggccagggtggtctcaaactcctgacctctggtgatccacccacctcagactcccaaagtgctggggttacaggtgggagccaccacaccggtatagatacgatttctattaaatttttgttaaatacttcaaagctatctggctctggagttatctttatgacaaaattttctagattcaattcatttagtggaaataatattattcaagtttacacttaatatttttctcataccagatttaataaattttattaatttattctcataaaactatactatactcattatctatcatgcccatattatttatttctttttttaatccttcctgatactggtaaattgtgtcttctcttttttatttttaatgagacttgttgtatgtttatgaattatatttgttttttcaaggaaataactcttggctattttctctattgtgtttgtttttattttattaattccatttttccttctttctatttaatttctacttttttcattttattaatttctatgcttagataataaatttgtcatccttttatagttattctttttaactactgcttttagtcaatctacattatatttttattattcaaaaaattgaatactcaaatattcaaagtattcattgtttctaattttcacttaccaataagttattaaaagcattgttatatgcctatttttaaatttgtttaatcacgttgttgaaatattttataacacttatttactttatcttttaccatgatattaaattcttaaactttaattgtaggcttaactacttttccttttaattctgacagttttcagtttatatcttttgaggttatgttctagttgcatatacatttggggttttatatatgcctgttgagttcacagttttaacatactaaatttttctctttgtttctcgtaatttttcttgaattaaattctgcatttcctaatattagtatagataatattagctttattttagtttgtatttgtgtggtatatactttgctgcccttttattttgaatctttctggtctttacagctaagattaattctttataaaaatatataattggttctaaataattttttaatcccatattataatttttgtcttttaatgaacacatttatgtcatttagatttaatgtaactactgatagatttaggtttatgtctgtgagcatttatttcctgtaacttgaaaatcatatcatgcattcttattattaccttatatttcttcatagaaagtgaaactaccttaaatattttagttcattgtttttttcccagactttatgctttttatcttttaattatttatatgtagaatttaaggcattatatatatgcttttaatacatcattattaatatttaaacggtggatatacatttaaataactcatgtttatttttctgatattcttaattctgtatacattgtatttaattctttatatctaatactttatgcttaattctttactgtttccatttaggatcatttttcttcttatatgactcatatatgtgtatgtaagagtaaacctgttagtgaaaattctgttaatttaaataatccttactttaccttctcttttgaagtatatttttgctgcttatggaattcttggtcatctattctttcatttacatatttatttatttatttgcccttcaaagaaatcattattttgttttattattttgccatttctattaaaaattaactgtcattttcaggaacttttaagatttttttccttctcttgatttcaaatcaggattggtttttctataatgcaataaggtgtgtttttcttatttattctccttgtgttttataaaacttttaagtctatcactgatatccttcatcagttttgataaagtataaagtattaactttttttttttttttttttgagacggagtactcactctttcgcccaggctggagtgcagtggtgcaatcccggctcactgcaacctccatctcccgggttcaagcaattcttctgcctcagcctcctgagtagctgggactacagttgcccgccaccatgtccggctcatttttgtatttttagtagagatggggtttcaccatgttggccaggctggtctcaaactcctgacctcaggtgatccacccgcctcagcctcccaaagggctgggattacagacataagccactggcgccgccaaagtatcaacattcaacagttcaaatattatttttggatctttctatatcttcccttcttggaagttacaaatacttaagtattctacatgtttcatactattttgtctagtttgtattaatttatctcttaatgcttcagtttggatactatctaattgcctatcttccatttcactaatcctctttgtcaaatctattaaactcatgcattaaatttttaatttcaacttttagtcttaattctaggattttcacttgactcttaaagtagatctctgtttttcctgttgattcaagttgttcggtactttgtatgcctcgtatgttttgattgaatgctgaacaatatgtgtgatataatgtgaaggctctatatgatgttatatttttccaaagaggatttatttttctttctgaagacacatagagtaaaagcatatcaccgtgatcccttgttctggtttactcttaatttttgggcttagcatgtctggtatcttaactaaaagcttctactttcacggactcttgcttttctaaatctataagcttgataaattatctgctgacttttaatctgttttcaactgctttatgattattttcacatttgaacctttttctatgtatgcacagtcttagagttagcaatatattagggagaaattgcacatatattgtgtatttcaattctctgtcatcctttttttttttttttttttttgcaaaaccagtcttgttggctctggtaggtctgaactttaatgttaggcttttgtgaaactgtgtccctgtgagactgcaacaacatttacttggctactgccttccttttgggcttactgttcagtttcaagaatcagcaaatgctccaagagggaaaggtagcagtgaatataataatcatctcagtgtggtttccttttccctgtgatttttaaaaaatattcttattgagatgtaatctacacaatatagtaatatgtatttttctaaggattcttacattcaagtctacagaatacaacttaaaacttctacttcattaaaaaattgctttcttgctatttcttagtttctttgcttccgttgcattaaaattctttcttaattactgtgcattcatatttccattgacattagtatttttttcctgagaatatacatggtacttgaaacaatgtaaaaatacagcatacaattttatattgagtattataaaataaaatattatgtaaatgaaaaaactcagaaaataaattaattggagtccactataagagaattgttgacagcttgcccagatgccctgaaattataaaaaagattgtaagcaaattaacgctttaacaagattgtagaaaaaaagtcagaactgctaaattaagaaaaataaatactttcagtactttgaaaacatccctttacacacaaaaacttggcatgctaattataagctatgcttatctattaattaaagtattttttcctatcctgtagtggacaaacttattttgaatggctgtgtgaacttttacataataaaactacttttaaaataccaaacttaaggttttataattgtaactttttcatcccataatttatctgtgatcataaacttttatactattaatattattctactactttttatttgataaaattattttttaataatctacatgacaaaactgtatgagagccctagataaatatttatgtgcttcttaggtgaatgtttaaattattttttgcttgcaatttgatttcagaattaaaatattcttagagcagaaatacagtttctatcatgtatggcttaagaaaacaaatgtcaaataatttgttattcaaagtgtaggtattatcttcaaagcaagcctgtcatttataaactgtttaattctttttattctccaaaagagcaactccagatagcaaaccttaacacactgtttttctgaaatttgatttttttcctagttaaggcattttctttctaatgtaatataaatgtaatgtctgaaattattttaaaacgcttaaagcagatattggccaaacaagatattaaggccttaaacaagatattgatccaaattacttattgaagataaaaacagaacagagacaggttgccttttcacttctgaaaaccatctgtgtttgaggtgattctgaacatgaatgaagttgtctactggtcatagctagaacacaagggcttgaatggtaacagtaagaaggaacacagtaatccagagcaggaaaaatggaaataattatcaaagcaacaattacaaatggaagtgattaaaataaaggttatggcatggtgccagttaaccaatataccatgctcacactcatgtctcatgaagttatgaagctagaaagggatgaatgaattaggccatggtggagaatccaaatagtttttatactatctggacatgagtccaaatgttgagattaaactcaaacaagctaagtgagccaaaacacctgccttagagttaaatattttgggtttgacttaaggctttgtcacctagtatctgtgtgaattcagacaagtttttgacactctgtattctttattattttttgctacctgttaaaaaacagtctaaaaatatccactatgccaaactcacagagtcattttggaggaccaacttaagaagtttcaataaaataagattttactaatcatcttctatgtcttccttcttacttgttaccttactgtgttccttcttactgttaccattcaagcccttgtattctagctatgacaagtagacaacttcatttatgttcagaatcacctcaaacacagacggtttttagaagtgcaaaggcaacctgtctctgtcctgtttttatcttcaattagtaatttggatcaatatcttgtttaagcccttaatatcttctttggctagtatcttatatgaatttcacctatgagaaaaagtatagctgtctttgtgtttcaaattggtttttacgttgatacatcattctgcccaatgacagaaagtacaattttcatgtgagcggttgacacatgtaaatggctagtcctcaggatttgcttgcgtcggtaaacaggtgattttaacaagtggttatatccctcttttatttcttttttttaacctttatattatattcaggggtacatgtgcaggcttgttacataggtaagcttctggggggatttgttgtacagattatttcatcacccaggtattaagcctagtacccattagctatttttcctgatcctctccctcctgccaccctccaccctccaataagccccagtgtgtgctgttcccctctatgtgtccatgtattctcagcatttatctcccacttttaagtgagaacatgcagtatttggttttccttttccacattaattctcttaggatgcttcgcatccatgtctctgcaaaggacatgatcttgttctttttatggctgcatagtattccatggtgtatatgtaccacattttttttttactgagtctattatttatgagcatttaggttgattccatgtctttgctgttgtgaatagtgttgcaatgaacatacacattcatgtgtctttataatagaatgatttaaatcccttcgggtatatacccagtaatgagattgcttagtcaaatagtatttccatctttaggactttgaggaattgctacattgtcttccacaatggttgaactaatttacactcccaccaacagtgtataagcattcccttttctctgtaaccttgccaggctctgttattttttgactttttagtaattgcctttctgactggtgtaagctgttatctctaatgtatttctctaatgatcagggaggtggagcttttttttcatatgactgttggctgcatgcatgtcttcttttgaaaagtgtctgttcatgtcctttgtctacttttcaatggaattcattttttaaataaatgtgtttaagttccttatatattctgaatattagaccttcattagatgcatagttggcacaaattttctcccattctgtaggttgtctgtttactctgttgatagtttcttttgctgttcagaagctcttcagtttaattatattccaaatgtcaatttttgcttttgttgtgattaattttggagccttcatcaggaaatcttttcccattcttatgtcctgagtggtattgccttattgcctaggttgtcttccaggatttttataatttgagttttacatttaagtctttaatccttcttgagttagttaatttttaatttttgtatgtggtgtaagttatttatttatttatgtatttttgatggagtttcgctgttgttgtccaggctggaatgcaatggtgctgtctgagctcaccacaacctctgcttcccaagttcaagcaattctcctgcctcagcctcccaagtagctgggattacaggcatgtgccaccatgcctggctaattttttgtatttttagtagagacggagtttctccatgttggtcaggctggtctcgaactcccaacctcaggtgatcctcccgcctcggcctcccaaagtgctgagattacaggcatgagccaccatgcccagccgtaagttaatttttgtatgtgtgtttctatgtggtgtaaggttgaaactgaaagggttcagtttctatcttctgtatatggctagccagttaacgtagaaccatttattgaataggaaattctttccccattgcttgtttttgtcagatttgtcgaagatcagatagttgtaggtgtgtagtcttatttctgggttctctattcgtttccattggtctatgtgtctgtctttgtaccagtaccatgctgttttggttactgtggcttagtagcatagattgaagtcaggtaacatgatgcttctagttttgttctttttgcttaggattgtgttggctatctgggctcttctttggtatcaaataaattttaaaatctttttttttcctaattctgtgaagaatgtcattggcagtttaatagaaataacgttgaatttataaattgctttgggcagtatggccatttttacagtatcaattcttcctatccatgagcatgagatgtttttccatttgtttgtgtcatctgtgatgtctttgagcagtgttttgtacttttccttttagagacctttcacctccctggttagctgtagtcccaggcattttattctttttgtggcaattgtgaatgggagtatattcctgatttggctctgggcttgactgttgttggtgtataggaatgttagtgatttttgcacattgattttgtatcctgagactttgctgaagttatcaacttaagaagcttttgggctgagactatggggttatctaggtatagagtcatgtctgcaaacagggatagtttgtctccctctcttcccatttggatgtcctttttttctttctcttgcctaattgtcctggccaggatgtccaatagtatattgaataggagaggtgagagagggcatccttataataaggggtcatatctctacactggcacctacctggattcagcttttcagtttgaccccctacaagaaactccaccatcactagctaatgctattcctttgacctacccacagggtttctttaggtgttttggcatctgctgtcacatctgtgtctcactcagctctataggaaaacatttaactctctcctgccacctgccagagatatgccctgaggctctgtacctttggcttcagtcatcgcttgaccacatgcaactctctcaacacccgtgaagaacctgccagaatgtaggaacacaaccaggaatgtgagcatgggttatctcactctttcatgacttaaactaatgtaggattttagcacaaccctgtaagatatggcctagagaaaaaaaagaacacaagacaacagtcgtccgtctatgatccgtctcttgttctctcccattctataaccactgggatcttatctgagtaggaaagcaagaaaaatttgtttatggaataaactttatgacctgtgtcttataagattatacttcagaaaaacaaaatctcaccctcttgcacttctaaaagccttttctctcaagatcataatctctattttcagtaccaaaagtctgttttaagtacagacttaaaatattgacccatttgttttcccctgaatttattttcctaaaagacacaattccatattttcctagctgttgggtaggggctgcaagtacaataaattgtgtttgaagtgtgagggtagcactgatgaagatgtagacatatcagtcaataattcaacatattcctacacatgtgctttcccccattagaaataaaagcctgagaaaagaaatggttattcttttgacaactgtgttctcagcatctagaatagcacctggaaaatgaatatttgttgaatgaagacctgtacataaaatggctcaaatcctcatcaacacaaacacccacagaagtattgaaagagaaaaggactagaggcagaaacctgagaaaaacaaataatttaaggtggaagatagtggacaaattgttagtgaaggaggataagaaggagaggtcagcaaattagaagaaaacccaggtgaaaaaagaaaagtggtacagaaagcaaagaaggagagaattcaaagggcagagaaagcaaactatgttaagaagaaaataaaaaacagtgatctggtagaataaaggcttaagagcaggtgaatggttttgacaatttataggccattaataacctttgagagatcagcttgaatgaaatagttggttcagaagtccaattgcaatgggctgaagagtcagaaaccagctaggataatgaatgtgaaagtgcttcttaaatcttaaaccactttaaaaatgcaattagaatatacagcttgttagatttaggtcctgcttgttgctcattcaccaaactttctgaattcatctatttttcttggcatcaagcacaggcagctagggctttagctgagtatgtcacaatcaatgaaacagatgttaacatttccttaacatttttcttcttccttgacctaacctttcttcatagcatgcccaggtttaaattaatgcactgtgattaaacaatcttcaaatgcactccactgtttctctaggtcatttcaataggtcatcttctattgccaacaccttcacaacttgccctcagcttcttaaaaaattctgatttgtttaggcaaaattgataaaactttgaatgtgtccttgacctcagccacgagatctggaacacaatctatcacttaaccatgcctcagaactggccccaattgcattattttgaatacttcttatttcttggcttctctatccctgatttccatttttatggattccctgtctatcaagtgaactactagacattgcatgaacttaagatatcattaattacactctgaaagttttcttttcctgactcgggcatatatttctcaaataacctcattctaattttccttttaatgacacctaattgtcagaacattaatagaaaggcataaaatcagaaattttagattggttatatttaaaataattcagaaagtaacggtttgagagtatattaatttgtttcatagagaaaacactagcagatattaatatttaaagtttcctgccactatttgagatttttctaccagaaccttataacttatcttttcagcaccagaactgtttatgaagaaaaataatcaaatgaaataatttcatagttatttttattggcaaaacagtgacatctattgttcagtgttatataaaatggaattcaaaaatcaaaagcaatgccttatttttaatgtgattagctccagaataataacttcttagatttattgtttcaaaaagagtaatggatgatattcaataattcatttttattctgaaatcaaatttaggtgattatttaggatcatgaacatgtaattatgattcaaaggcccaagatctgtctaggtactaaaaatagaaagaaagaaataagataaaaatatggaataaaattcttaaaggtgactgctttttttctatatatgtatttttcttggtataaatcagtttaatatgtttactgaaatctgtgaatccgcagattgatttctgaactcaaggcaagtttctgttctcatcttaattctgttgttaactaaatctgtgaatttaaataagttgctttcatcttggctacagtttattatccacaaaaatatgagtatgagtcttgaactgaaagtagtcaacttcctgctagcatttatttttccagaagatgctattcagaatcactagattaagcaaaaatttttaaagtttgaccatactgagtgtccataatgatatggaagaattgaaattctcaaatactgatgttaggagtataaacaaatacagtccctttctaaagcaatttgaaaatatcctgtaaattttaaggtgaatctatcccatcatcctgcttttccgtttgtgtaagcacttcacagggaattcccacacatgcacacaaggaggtattttcaagaactacatcattgcaatattgaaaaattcacaatatattacaggagaatttataaaatcttgcatctgtacctactgatatattttacaatataaacataaaatgattgaattacagtagcatctatcaacatgggtaaacctcaatcaaacaatatgagtaaaagaggcacatttcagattatgtagcaaatgaccttttatataagaaaccaaaatgtttctattcattgactatgggcacaccataggtaaaaaagtataaaatattcatgagaataataaagaacaaattcatgacaatggtcacctatggaaatacaggggaggtaatgtgaccaggatggatacactgggacttgaactgcatctgaaatgttttccttattgaacaaaaagagagaaagacatctgaagcaaaataaggcaaactgaggagctgttttcaatgagttatgggcacactgattcttattagatgattatacttttctgcatgttttaaatatttcataattttgataaaaacaatattaaaattctaattctaaatctcacagaaaactgagtacctaatcttttttgtctattttttgggatttttatgagattagaatttagtgacaagtgtatgataagttctgaaacatagtttgtctctctccagtcctcatatttgttaaaacaaaaaaagcacagcaagaataatttttcacataggcttttaaattggctttgatggaactcttttccacaaggaatatcggattagactttctaaagctgagaccagccatgggttcataccctcaaattactattagttgagtaaattcctccattcttgaagtcccaagatagcttggggctcctgggcatattagaaaatgacgttctttacttaccacaggttaggaaccctatacagtgactgtgtagacaaggtgtgaagccagttttcccaagcggcttttattggctctgcaagtcacgtttgattccttaaagggaagcacacccttccagtcaaagtcttagtaaaacaaccagtttctccaattgtgtcctgttgcaaaagaaaatggatttttattgcacttatcctactaaccatattgccataagttaagaatactcacaaatagtttccaaattctagagaaaccaggtgagagaaacaaatatgccccaaattttgttaacaggagtataccttactcaattgttaaaagctgcaggccaggcgcagtggctcacacctgtaattccagaactttgggaggtggaggcaggcggatcacaaggtcaggtgttccagaccagcctggccaatgtggtgaaaacccgtctctagcaaaaatacacaaattagccaggtgtggtcatgggcatctgtaatcccagctacttgggaggctgaggcaggaaaatttcttgaacctgggagaaagagtttgtagtgagccaagattgcaccactgcattccagcctgtatgacagagcaagactccgtcaaaaaaaaaaaaaaaaaggaaaaaaaaaaaactaaaaaaaaacccacaaaaactgcagatagctcaaaagaaaagtttttttgactccgaaaaacgaaataaggaccagcaatgttttaagcaaaaagttaaacaagattacttcagttttctgttagttcagtccattcagttaactcttgttctgcttgatattcatgaacatttcagctcttggtgagttctgaatgtttttcatttattttaatgtcacaatctccaaagaaatcagaaacccgtatttgagagcacctgtgaaagtcctatataaaccatcttttgaaaaggatcaaagcaagacaattgtctgtgaatgacaaaatgtccagggtagttacagccaaaaacacaattgacaaagaaatttggttacttctgtggtttacaataaattaacataataacctcattatgattgatgacatatactgagacaataaattttagaaatcccatgcaatttttgaacatatattaatattactcactaaaatataacctaaaaaagattaaaccttatttttgttttggcaatcttgtgtaactaaacatgtcaaataatcctatttacctctcctttggatgctctaggggccctctgtagtatccaaaagttagaggtcaggaaagacaattttgaagctgaaatttgattttggaaagtctatcaaatatgttaaaggtttaaaacccttgatattatgaaagagaattccaggttaccataattcatttatttggtcaaaaggtgactcaaaacattttttacaaaggggaaaaaccatttactcattaagagggaagacttagctttccaaacaatctgtctcttgtctttcccttccttttttggtagtttattctcaagacaaacaagaaacctccattatcctttaatgttacatgaaaatcttgttagagagaaaagaaagccaaatttcacccttgcattagtctactattaatgtccactccaattttttaaatgaaattttaaaaaattaattttttatatttttaaaaatttttaaatttcgtgtaataaatcaatttattatatcatactatattattctttattatattataattctacacaatcttagctattttgactatgaggtgagattcttataaaccttttttttttttaaaggcaattctttttttaagttttttttcttttattattatactttaagttttagggtacatgtgcacattgtgcaggttagttacatatgtatacatgtgccatgctggtgcgctgcacccactaacttgttatctagcattaggtatatctcccaatgctatccctcccccctccccccaccccacaacagtccccagagtgtgatgttccccttcctgtgtccatgtgatctcattgttcaattcccacctatgagtgagaatatgcggtgtttggttttttgttcttgccatagtttaatgaatgatgatttccaatttcatccatgtccctacaaaggacatgaactcatcattttctatggctgcatagtattccatggtgtatatgtgccacattttcttaatccagtctatcattgttggacatctgggttggttccaactctttgctattgtgaataatgccgcaataaacatacgtgtgcatgtgtctttatagcagcataatttataatcctttgggtatatacccagtaatgggatggctgggtcaaatggtatttctagttctagatccctgaggaatcgccacactgacttccaccatggttgaactagtttacactcccaccaacaatatcatactgaatgggcaaaaactggaagcattccctttgaaaactgacacaagacagggatgccctctctcaccactcctattcaacatagtgttggaagttctggccagggcaattaggcaggagaagcaaataaagggtattcaattaggaaaagaggaagtcaaattgtccctgtttgcagacaacatgattgtatatctacaaaaccccactgtctcagcccaaaatctccttaagctgataaccaacttcagcaaagtctcaggatacacaatcaatgtacaaaaatcacaagcattcttatacaccaacagcagacaaacagagagccaaatcatgagtgaattcccattcacaattgcttcaaagagaataaaatacctaggaatccaacttacaagggatgtgaaggacctcttcaaggagaactacaaaccactgctcaaggaaataaaagaggatacaaacaaatggaagaagattccatgctcatgggtaggaagaatcaatatcgtgaaaatggccatactgcccaagctaatttacagattcaatgccattcccatcaagctaccaatgcctttcttcaccgaactggaaaaaactactttaaagttcatatggaaccaaaaaagagcccgcatcgccaagtcaatcctaagccaaaagaacaaagctggaggcatcacactacctgacttcaaactatactacaaggctacggtaaccaaaacagcatggtactggtataaatcttttttcaatcccttaccaatttctgttaaagagcagataaatgccttaagaaaatcttgtgcttttatttcaatgcttaatttatggaaaaagaaaataatacccttttgaatttagtcaatatgttcacatatttcttttacaaggtttatttttacaaaccttctacaacttgtttaaacctttagcttcatcttatctaatctaagacaatcctttaaccctttcaactaggcaaaaatttaccttcccatggcttcttataatcataccttcttataatcttttactaaaaacacattttattttccttacaaaccttgtatgtaaatcttttttcagtagtcttaattacatgttataatggtaattctgaacaatctttaattttggtgtaaaacccagttattttaattatgttctaggtgcagataaggtctgactgttttcagcacatttagaggtgtggttaattccatatgtccacaggccttaccaaactgtgaagcagacaagttgaacaattttcaaaagccaaagaagcagtttatgaccttaaagcatgtatcaaacctagtatgtaacctgcataattcagaccccatatttacattttgaagatatttgtattttaccaataataattaaaacaagattaaagttatgtaactaaaaggtatcagaacttttttttcctttaaaaatatttgatctaagctcttattttttaagccagttaattagagctgtttttttaataaacatcatgcacataacacatacatacagacagaaaaagattcactagttgtacaaatattcattttgccaatctcctaattggattattgatctcaggctggagcccttcaagaaacaaggctaggaaagcgtgtggtttaggagccttagattttgagagggatccatccacttttaattcctggagttccatgaggaaaacagagacttttttcccaaaatggggtctgtgacaccttctctgtttttcctaaaaagtaccaggctattagaagttatctttgtgcctctcatgtgtgcattaagagtggcaagacaagatggagacaattaatttagccaattgagaaaacaaaacaaacaaacaaacaaaaaacacttctagcaaaacaagatccaagaagatccaagagaaaaaacaaaacaaaaagccataaaggccttttaaatatacccatagcttggatatccacttttaattaagctgaatgttaaccatagaaccattttttaaaaatctttttaaatcccttattactcgactttagccacaccaagcagccaatatttctggcttttaaactttaccaaaggtaacctcacaggtgaaaccaacaagccttgtttaaggttatgacttaaccatgagtgtacaagatactttcaaacaggtggtaaagcagtttttacaaaacacccccaatattgtatataaagaagagacaggtgccacaaaaaaagaaggaaaatgccttagaaaagactggattggaacagagccgacattctcatccccaagtgcgatggggtgtgggtggcagcctcctctgcagccatgtcattcattcttaattggctaacagagatccggtgctccatctgttttcagaaaacatctgaggacaagaaagctcagaaatgaaagtgaaagagggtttgggtccacattttttcatccttcctcagatccttgacaagcccccagaaaatgacgcaggattttacttggtcattttgccagctggggacctctggctgccaacactcctacctgggtctcactcaggcatgctacctgctgcaggaggtgccccacccacttggcccacccaagctgagtctggcttgcacacaggcttggcttgcacacaggctcagcctgcagctgtgctggatgtgccttagctcacctgtgctgcagtttgtacctacattctgcggttcctgagctcttgtctggcctctaagaagaataaggataagttgacaattgaagagtgaggagggcagagaataattttattgagcaacagaacagctctcaacagagagggaaatggggagtggtcccccatccctgcagttagatggtttctttctcagtgtggctgagtcttgggcttttatctctaatgtcgtctttatccaaagagagccaaaatagatcattcaggtgatttggggggaaggacatttaatttcatgagaaaacatgtttgttagtatgattttttaattgaaatgattaaatggccaattcaatgaaagcaattgtacttgtgatcatgtgtgaatacaacattaatattaagctcagttatcatcaaccagtaacaaaagaaataagaaccgtatataatggccctttaaagaaatctgaacaggatattataagcattttctagtatatgatatggtagataatggttctactagaaaaccaaatccctaatgtgacttcaaagagcttctgcacagtggttgaatctagattgcaagatgctcgtccccagaagctctagggactgctaatggagaagaaaaaattggatgctgccaattattacctacggtcttggcccctgaaagcagtattttcccctactataaattgttgtacttttaaaaatgtttctaaaattataaaatttatcaaactggtagtatttgtgggaggggggaatcagcccttaatgtaatccttaaaaaatgtaattttggacaataaaaataaaacaagcttttgtttagtttcatggctcttttaaagctctctcctttaaattaaaatatatgcaatccaggcattcatttgactaacaaatatatttgaacttctattatatgacaccactcagtggatattcattggctttacatagccttcataacatatcatagatgtctttgaagtttatttatgtggggagagtgggagatgtcaagggaagacatgaaacctaggatacatcctgatgggatgggcaagaggcaaagacacagccccagaatttactcctagtcaaactttcctcctcattatatgcctcttcaatatctctttcctctcacccaccctttactcaagtagaaaggccaatgcttgctttctattcaaatgcttatgggaatgcacatgccaaggctacaatttcctgggtctgtgataatatgaaagaaacatctaaaaatctcataacatgtcctctccctctgctgaggtagaaagttataaaaacacctgtgaaacagaagagagaaaaactcaaaggtcaagtccccatggatatgttctctcgaggtcacaagctatagagcacaagtttatgaggagcacagagtgtatgtagtttctggcctcttattcagctgtctccaaataacatcttgtgtcctattttcaaaattcgccattcacttttgcttatataaagtttaattatattagtacaaatatgtaatatataatcgttctattgctgatgcaactaatcacaacaatcctagtagctttaaaagaaaccccaattttattatttagcagttctgtaggtcagaagtccactctagctgggataaaaccaaagtgttggcaggcagggctgtgtttcttttcgaaagctctaatggagaatccatcccaccgtctttttcagcttctagaggtcatctgcattccttggctcctggctcccttcctctttcttcaaagccagcaagtttgcatttctctgacctttgttctatcatccatccagcgaggctctttgactacaacagggaaatgttacctgcttcgaaggatttctgtgattacattagactcacccagataatcccaaaataaactttccattccagggtccttaaccttaatcacatctgcaaattcccttttaccatgtaaagtagcttatccacaagtttgaaggatcagcttgtagacatctttggaagtcactattctaacatacatacatatcggaataattatatatgtatatatgcatatatctctatcatgaatttatatacattcatatatacactcatttgtatgtcctcatatatgtgtgtatataatatgaatatataaatttatatatatgtgtgtgcatatatatatgatgaatttaaaatggtaaggacatcaacacagaatgaggacaaggattcagtgctaaccgtttcttgactggccctctatacgtaatctttttgaattttcaaaacaaccaagcaagttagatgaaatttccagtgtcagcagataaagaaacgcggttgcagagaagtctagtaatttaccctaagtcatatagtttttaagtgtctctctcaaaatttaaacacaacctatactctactatcaaggccaatttgaaatgaagaagtatgatttagagggagccatattaccaagatgtaaaattttaaaacaataatttttagatcaaataatttacttaaaagtctgatgattaagacaaacctggcatattcgtaactgcttctcctagaaaccgtttctcagtaaaaggcaccacggtatggtattggacaatcaggaatctcatgtctttttaatgccccctccccttttccctcactaccatttatagtcaaaacgtcaccatgttcttctttcccttccttttacctatctctcaatctcatctattagcattgccactcctctagtgtacagatcatttggtggttgattttaaaagccttctaacttctaactggttctctgcctcctgtcttgctcacctcacccctactatctattctccattattacagagtgagtgctttaaaacgtgcatattagcctgaagctctcttacttaaagcctttgaaattctctccatttcccccattgcttttaagacaaaaacaaacttattttacaagacttgcctagttggctgcttctgctttcttcatcaatttatctcccataaccatcccatacctcctttcctccttcacacaattttatcttctatttagtttctttccattcctaaaacacacacagacacacagacacacacacacacacatacccctcttatctggtctttttcataatctgtccctctggaaaattctcatctaaattgttcgtttgggccagatgcggtggctcacgcctgtaatcccaacacttcgggaggccgaggcgggcggatcacctgaggtcaggagttggagaccagcctggccaacatggtgaaaccccggctctactgaaaatacaaaaattaggcagcatggtgtcaggggcctgtaatcccagctacttgggaagctgaggcagaactgcttgaacctggaaggcagaggttgcagtgagccgaggttgtgccactgcactccagccagggagacaagagcaaaactctgtctcaaaaaaaaaaaaaaagttcattcggatgagttttgcatatcctctgaaaagccttccccgaatttcccagtctgaactagttactctcatatgtatccttacagaatcatgtatatcaaaatatttattaccctaaaatttcctcatctgtttacaggttgtatctcaccccacaattagaccctactttaggggacaggagtcatgttcttaaatatttgcattttttaaaattacacgtttacctttttccgagatcataattacttacgtatgcatcttagaataacttctacatatagtctccactttaaagctagtaaaatactaatataatttataaatttccatagctaagacaaataatatcaaaaaacagaagttattaatttttaagaaagttatattacaatttatggaaattttagattaaaggtctaaataatctagtttctgccataaagtttcatattttgatatctgggctgtccatgcagtcaaatgactctgaaatcattttatacattattcttcccataaataactgtgaaaatattattgtttcctccaaaaaaatgaataattagaagtagtttttatgtgtatgcacactaaaatttggaactacaattattaacaataggattttggtctaattcaaccactttctggggctaaatcaaaaagatattaagcttaaccacactttttaaattctgttctgtgtggtatgtaagaaaagggaagctgatcaaaccaatgttttatactgaaattatgtttctaaaacaagtaaccaatttacgggatttaaaaaaataattttgtgtcaaaacaattggtttttcaactctctgctttatattttaattgtttgtttttgagtcatcaaacacgtgctgattgaccataataacaatcaaattaacaaaacagctgccaatgttagtttcaggcttaatgtgtctccttttagcccatttaaattcaccacacctattgatgaactgaaagtttggttctcagattttgccagtgaaagcagattctaacattaaggatggttgactatgataatgaaactcagtgattggcatggggaaatagcaaggttaccataagaagacaaaactaggtatgtagaatacatgaccaaaattatggaatgcattcatttgacagacctggtgcacttactgttagctgctaaaacctccacttcagacgcacttttgtcacacttttgtgtatatgattgtggcagccaacattgaatgaaaaaaatacgagaaaaacatgataatgtaggaaaacatggagagaagacttttgcaacttagaaatactcttgtaaacaaacggagagcctgttttactcaaagaaagtctaagttttaagttgaggagaaccatagtaaacagaaaaccataatgcaatgtcatttctcatcattgtagagtcaacatagagttctatttagaactggttacagagggatgttgccgtaatcaaaacacaacttcctgacttctaatgagttcttgactttctgattatgtaaaagatatggacagattgttatcatgatatttcctatgaagttaattctttcactagctttttggcatgggaaaagattgtgatactgccttgaaaattctacaagatttttaaagatagcattttataataatgttttaaaatttcatttttatacatcacatttcatctaacactaatgagggttggttagtcagtggtttagttagggttctccagagttagatcctgagaagaaaacctggggtgcagatcaggaaaaaagagggagccaagcaacagtacaatagcagaataaaaaggtaaagggtaactttaatctcatctgcaaagaaattctagagtataagttatgcttcagaattctgctgacctgagataacggatcagagatttcaaatttttactgccttcagacattggctaagggctccaagaggaatataatatttcaggtaactctgtctcttcccatttgcaggcaaaataggtttcagtagcccaaggacagtcctttactagctgttggaagcaaaagcacatagaaactgggaaggtttggaagggattcataaaaccagcaggaaaaaagtgacccaaaggcacacgagcagaacacactcacattgtacactgcagtcaggttttactacctcattttcaaagacaagaaaactaaagataagcaaggaaatgtgatttatatacagtcacacacaggtaaaggtgcaaaattgagattacaaatgaccctagttatagatcctgtgttgttcttgctgttgcttcctcattacatcatactatatgataatgttatttattttcataattagcatataaccttagaataaaatattacctgatattttgtagcactctacacattttcgcttactttgaatattttgtttctctttgtgtaggtagttttataaccaattaagccagaggtcacaaatatagggctctggcagataatgtaaatcaattaatcaggccagctgagagaaacaataaagaaaggtgaaccccctggagagctgctgtctgtctaaaggaggcagccatctttcagtcccagattcttgctgcggcgagacaatgaagatctggtgtggccagaccatctgttttctgatttttccaagttcagcaaaaaatcagaatatttcatatatagtctcctaatctttaaatactactcactgacccattgttttaactggaagccaattttgtacaagtcacacatacacgtgctttctctctctcttccttcctttctctttctttctttctttctttctttctttctttctttctttctttctttctttcctttctttctttctttctttctttctttctctttctttctttcttttttccttctttctttcttctttctttctttctctctctctctctctctgtttctcaggaaacatttctattgtgggtgagctactattttgttcttcaggtatacactagcatagttggtacagttgaactttagatatgcctcctctgatgtcatttaaattaaaacaattttaaaaccatgatgctggtcaaaaaacatgcagtgaacagggtttagtttgtggcccctgaactaagttaatgcttccctgaattatatattttattcaattcagtcacaagtgatagtttattttcaaagcaaatgaggcattttgtgtgtgtgtatgtgtgtatgcgtgcatgtgtgtgtgtgtagggggggttttgactcttatactgaactacaaatgaaagcagagggagaattcaaaattctttaacattgctgtaaactctgtcaaagtgaatcttctgtgtctacagcagtgacttagaatctcatgacacccaatgtcctctttagtaaaattttgtatagcaccaccactgttatcatggaatgaaatttataaaatactattgcatatcgacacacactaattctaagaaaatcagtatcaagcccaaactataacattaggaagaaagaacagaaaactaacttataattgaataacatgcatatctctgtctaaaagcttggacatgattatactagaagacttaattagtcatattcttgcccctataaaatgactacctgtatatgtcagctgcaaatgaaggacagtcagaattttggcatgggtgatctaaatttttaaaaaatgtatggttctcagtaaaatattttccaaattgaaaaataatttttgatatgaacttccaaaaataaaataaagcacattattcctttcatttacacaaatgtcaggtgtccaggaaatgcaacatacataataaattgacacaaatttctgggtttgtgtgtaaaatgagttaggttctgagctcaaatacttattaaaagcttttaatctacttgaggggacatttggaattcatgtagagcagcggtccccaaccttttttggcaccagggacaggttttgtggaagacaattttgccacgacaggggcggggagggggaagatggtttaagtgcattacatgtatcatcagattctcgtaagaagcgtacaacctaaatccctctcatgcacaattcacaataggattcacactcctatgagaatctggtgtcgcctctcattagacaggaggtggagctctggtgtagagcctgagaaaaattctttaccatgctatctcttgctttgaaggggttctagcatccctcatcccaacctacctattaaatggtggagcatcccaattattgtgataacccagagagtttcactaaggggcagtactttcctattgagaaccagtgttctctaatgtcatcatgaagacagaagccaaatgagtaaaataacacagaatgttgaagaaaataggtttcaaatctttcaaatgacaactaacatggtacttgggagagagtacagtttggaaattaagatcagctgaggctggcttttccgcagtgggagccagggaggctagacagcttggtcccaagacttgtccccacagcccaacacaccagctgtggtagtctgtggccagagtgcctcttcaggtctaaccctggcccatgtttcctcagtgggtggggcttccctgcaggaactccaataactccagccagagggtcagggacagaatttggatctccctgggtctgagcccctagggggaggggtggcctcagtctctgcagactggcagacttagtctctcctcatggtagttctgaggaacgtgggcagcccaaacaagtgggtttccccccagtgaaccataccatctccaccaagtgacaaagtgtctcattaaacgggccctactctctgtgccacccaactgggtgagaccctccaacaggggttgtcagacaccctatacaggagcgatcctactggcatcaagttagtgcctctcaaggttggaagttccagtaaaaggagcaggcacccattctggctgctctccagcctccttgagtgacatctccaggcatgggagtgtatcagatgaatacggcctgtaatgaacccccagcaaactgtagcggccctacagaagacagacctgattattgaaagaaaaacaagcagaaagcgacaagaacagcatcatcagcatcatcaacaacgacaacaacaacaacaaaaagtcccccacaaaaagcccacgcaagggtcagcaacctcaaagaccaaaactgacaaactcatgaagatgagaaagaatcaagaaaaaaaaatgccgaaaacccaaaaggccagagtgcctcttctcctccaaatgactgcaacatctctccatcaggggcacaaaactggacaaaggatcagatggacgaattgacagaagtaggcttcagaagatgggtaataaaaatctacaatgagctaaaggagcatgttctaacccaatgcaaggaagctaagaactttgataaaaggttagaggaattgctaactagaataaccaatttagagaggaacatacatgacctgttggagctgaaaaacacagcacgagaacttcatgaagcatacacaagtatcagcagccaaaccgaccaagcagaagaaaggatatcagagcttgaagaccaccttactgaaataagacatgcagacaagaatagagaaaaaagatggaaaaagaatgaacaaagcctccaagaaatatgggacttcataaaaagaacaaacctacggttgattggagtaacagaaggagaaggggagaatagaaacaagctggaaagcacacttcagaatattatccaggagaacttccccaacctagcaagacaggcaaatataaaaattcaggaaatacagagaacaccattaagatattccatgagaagaccaaccccaagacacatgatcatcagattctccaaggtcaaaatgaaggaaaaactgttaagggcagccagaaagaaagaccaggtcacctaaaaagagaagcccatcagactaataacagacctctcggcagaaactctacaagccagaagagattgggagccaatatttggcattcctaaagaaaagaattttcaacccagaatttcatgtccagccaaactaaacttcataagcaaaggagaaataaaatcctttacaaacaagcaaatgctaaaggattttcacatcaccaggcctgccctgcaagagctcctgaaagaagtactaaatatggaaagaaaaaaacaggtaccagccactgcaaaaacataccaacgtataaataccaatgacactatgaagaaactgcatcaactagtgtgcaaaataaccaaatagcatcatgatgacaggatcaaattcacacataacaatactaacctttaatgtaaacgggctaaatgccccaattaaaagacagagactgggaaattggatagtcaagacccatcagttttctgtattcaggagatccatcttatgtgcacacacgcacaggttcaaaataaagggatggaggaaaatttaccaaccaaatggaaagcaaaaaaaagcaggggttgcaatcttagtctctgacaaaagagactttaaaccaacaaaggtcaaaaaagataaaggcattacataatggtaaagggaacaattcacgagaatagctaactattctgaatatatatgcacccaatacaggagcacctagattcataaaacaagttgttagagatctacaaagagactcagactaccacacaatagtattgggagacatgaacaccccactgtcagtattagacagatcaacaagacagaaaattaataaggatattcaggacttgaactcagctctggatcaagtgaactctgtagacatctacagaactccctaccccaaattaacataatacacactcttctcagtgtcacatggcacttattctaaaatcgaccacataataggaagtacaacacttctcagcaaatgcaaaaaaaaaactgaaatcataacagtctctcagaccacagtgcattcaaattagaactcaggattaagaaattcactcaaaaccacactatttcatggaaatcaaacaacctgctcccaaatgactcctggataaataatgaaattaaggcagaaatcaagaagttctttgaaaccaatgagaacaaaaagacaatgtaccagaatgtctgggacacagctaaagcagtattaagagagaaatttgtagtactaaatggccacatcagaaagctagaaagatctcaaattaacaccttaatatcacaattaaatgagctagagaggcaagagcaaactaatccaaaagctagtagaagacaagaaataactaagatcagagaagaattgaatgagatagagacacgaaaagccctccaaaaaaatcaatgaatccaggagctgtttttttgaaaaaattaataaaataggtagaccactaggtagactaataaagaagaagagagagaagaataaaatagacacaataaaaaatgataaagcagatatcaccactgacccacagaaatacaaaataccatcagagaatattataaacatctctatgcaaataaattggaaaatctagaagaaatggatacattcctgtacacatacaccctaccaagactaaatcaggaagaagctgaatccccgaatagactggtaacaagttctgaaattgaggcagtaattaatagcctactaaccaaaaactgcctgtgaccagacggattcacagctgaattctaccagaaatacaaagaggagctgataacattttactatttcaaacaaatgaaaaggagggactcctctctaactcattttatgaagccagcatcatcctcataccaaaaccagggagagacaaaacgaaaacaaaaagaaaacttcagacgaatatccctgatgaacatcagtgcacaaatcctcaataaaatactggtaaactggttccagcagcacatcaaaaaacttatccaccacaatcaagtcagcttcatccctgggatgtaagggcttgttcaacatatgcaaatcaataaacataatccatcacataaacagatccaaagacaaaaaccacataattatctcaacggaggcagaaaatgcctttgataaaattcaacatcccttcattaaaaaactctcaataaactaggtattgatggaacatatctcaaaataataagagctatttatgacaaacccacagccagtatcatattcaatgggcaaaggctggaagcattctctttgaaaatcattataagacaaggatgtgctctctctccactcctattcaacatagtactggatgttctggccaggacaatcaggcaagagaaacaaataaagggtattcaaataggaagagaggaagtgaaattatctctgttttcagacaacatgattttatatttagaaaacctgatcatcttagcccaaaaacttctttaactgataagcaaattcagcaaagtctcaggatacaaaatcaatgtgcaaaaattttgcaaaggaatgtgcaagcattcctttacaccaacaatacaggcaaggagagagccaaatcatgaatgaactcccattcacaatcgctacacagaaaatataatacctaggaatacagctaacaaaggatgtgaagaacctcttcaaaaagaactacaaaccactgctcaaggaaataagagaggacacaaacaaatggaaaaacattccatcctcatagctaggaagaatcaacattgtgaaaatggccaaactgcccaaagtaattgatagactcaatgctattcccatcaaactaccattgacattcttcacagaattagaaagaaaccattttacattttatatggcatcaaagaccccatatagcaaagacaatcctaagcaaaaagaacaaagctggaggcatcacactacctgacttcaaactatactacaaggctacattaaccaaaaaagcatggtactggtaccaaaacagacatatagagcaatggagcagatcagagacctcagaaataacatcacacatctacagccatcagatcttcggcaaggctgacaaaaacaagcaatggggaaaggatctcctattcagtaaatcgttctgggaaaactggctagccatatgcagaaaactgaaactggatcacttccttacaccttatacaaaaattaactcaagatggaataaagacttaaatgtaaaccccaaaaccataaaaaccctagaagaaaacctaggcaataccattcaagacatagggatgggcaaaggcttcatgaaaaaaaatgccaaaagcaattgcaacaaaagccaaaattggcaaatgggatttaatcaaactaaagagcttctgtacagcaaaagaaactgtcagagtaaacaggaaacctagagaatggaagaaaatttttgcaatctacccatctgacaaaggtctaatatccagaatttacaaggaacttaaacatatttacaagaaaaaaacaaccccatcaaaaagtgggcaaaggatatgaacagacacttctcaaaagaagatatttacagagctaacaaacatagaaaaaaagttcaacatcactgatcatctcacgccagtcagaatggtgattattaaaaagtcaggaaacaatagatgctggtgaggctgtggagaaataggaaatcttttacactgttggtgggaatgtaaattagtttaaccactgtgaaagacaatatggcaattcctcaaggatccagaaccagaaataccatttgacccagcaatcccattactgggtgttgcaggaagtccaggagcctgaacgaagagaccagctagagctgaggcagaagaacataaattgtgaacatttcatggacatttatcagttcccaaaattaatacttttataatttcttatgcctgtctttactgcaatctctgaacataaattgtgaagatttcatggacatttatcacttccccaattaatactcataatctcttaatcctgttattttcataaactgagaatgtacatcacctcaggaccactattgtacaaattgattgtaaaatatgtgtgtttgaacaatatgaaatcagtgtaccctgaaaaagaacagaataacagcgattttcagggaatgaggaaagataaccataaggtccgactgccttcagggttgggtagaatagagccgtatttttcttcttgcagagagcctatagacggatgtgtagtaggagaaatatccctgaattcttttcccagcaaggagtaaccctggggaaggaatgcattcctgggggtaggtctatagatggccactctgagagtgtctgtcttatgcaattgagataaggactgaaatatgccctggtctcctgcagtaccctcaggcttactaggactgggaaattccagcccggtaaattctagtcagacctgttgtctgctctcaaaccctgtttcctgttaagatgtttatcaagacaatgcatgcacagcaggacatagaccctcatcagtaattctaattttgccttcaccttgtgatctttattgccctttgatgcatgtgatccttgtaacctactccctgttcttacaccccctccccctttaaaatccctaataaaaacttgttttttgttttgtggctctgggttgccatcactgtcctaccaatatgtgatgacacccctggaggtccagctgtaaaatttctccttttgtactctttctctttatttctcagactggccgacacttagggaaaatagaaagaacctattgggggctggttccctgataactgggtatatacccaaaggaatattctactataaagacacatgcacacatatgtttattgcagcactatttacaatagcaaagacatggaatcaacccaaatgcccatcaatgacagactggataaagaaaatgtggtacacatataccatggaatactatgcagccattaaaaagaatgacatcatgtcctttgcaggaacgtggatggagccagaagccatcattctcagcatgctaatacaagaacagaaaaccaaacactgcatgttctcactcataaatgggaggtgaacattgagaacacatagacacagagaagggaacaatatacaacatggcttgttgtgggctgggggatgacgggagggaacttagaagacaggtcaataggtgcagcaaaccactgcggcaaatgtataacaatgtgacaaacctgcatgctttgtgcatgtatcccatcttttagaagaaaaaataataattttaaaagatacaggcagagaagaaaaaaattataatgaattttaaaagcttatgggatttatgggacaggatgtaaagagcaaatgttacaattaccaaatgttttatacataaaggattaaatgacagctcctaacctgtgtataaaaaaaaagaaaagaaaagaaaaagaaagatcagctgaggctgaccagccccaggcaaagggcaaaataataatttgttatccataaagtgctctgtcaatcaccctaggctgacaaggcagcaaactaaaacaatctttatgacagtggcaatcatacatgttggtcataataaaaggtcaagatgaattaagtcaatgtctttctcctcttcaagcattttcatttatagctctggcacgtgccactttctttaatctcgactaccaaatatactctttagctgaggctgtgataatttaatggtagaggtggattttggagaaaagaatctttgattttaaggtttttgaagagattagctggtgataatgaaatgatcaatttacatgtgagcacacaactagaaatcaaatgaagcctggagttcaagaccagcctgaccaacatggtaaaaacctgtctctgctaaaaatacaaaataaaaaattatcagagcatggtggcacatgcctgtagtcccagctactcgggagactgaggcagaaaaatagcttgaacctgggaggcaaatgttctttttacacagtaaataaaagtcaaaatgctttcctaaaaataaaaataaataaaaataaagaaatcaaatgaagctcagattttttaaacaattttaagatcacaggctctcatgcattatattttaaggtaaaagttaaataaatatctgttttaagttattttttatcaaatgattttaagcaatttttctaaaatatgacatcaaactagaataagaaaaatttgcagcagggctcaggttttaaaatctgaatagaattatttcaatcacaactaatataagtatgaaaaacattaaaaaaggaaaaatctaacttcttgagtcttattaactgcaatttacaaaaacacaaatatattctcaaatcatatcgatagcaaaaacaaacatcgttgaaccaaacaaaatcagaaaaatatagtaatatccaaggaagaaaaaaataatctaattgtcgggctaattaaatgcaatagccagaaaacattaaagacattaatttgatcgattaattttgtaaccatttgaaataatgctggaatcttcaggttatgagtttacagaggaaatagagtgagtaaagagtttgatgtcagagcataaattttagtacatgttcaaatgtgttagttttccatatatatatcaagtattcctcagatttagcaaacaaaatatacatatattttacaagatggttggctaatggttcttacaaatcaaatgagaaactgaaaggttaggattttaatgcttactcaactcctaaacacatgcagtcttgggaaagtcatttaataattctagctaccaaaatggagttaattatttttaaccatctttactaataatatgtaatttttttactaaaaattaataagcataaccaactaacactctatttcttcaatgcattaaaaagtagtatcttcattattatttagaaggattttcttgagtaagatttacataaaatgttaaggaactaacttcgaaatatataaaattcttatttctttcctagcaaccttttacctaatatagagaatattggtaaagattccttttaatcattggagacttttactgaactcatgtaatgtgacaagtagtctgctaactagtggggaaaaatactcaagtccttgaaagagctttcaagttataagataaatactatatagattttatatgcttaaaattttacaaagaaaagagtataacttaaatatcagaagtatacttaggtagaagagaacacttctgactgaagggattatagacagctttcttaaagacctagaccttgaagaatagacagtatttcactggacagagggatattgacagaggtagtggaatagagggaggtttttacaaggcacaagatatctctggcagaggtaatagccttaggtaaggtaacatttggcataaatagcaagaattaacatatttactcaaagatagagtatgtagaatgacacaatatgagataaggtttaaaaagtgaagtgtgatgaaatcactcagtggcaataggaacctctgaatatataaaagcatgcgagtgatatgaagagagttttgcatcttaaacgtgactctaaaaagttgaatagaattgttaagggaccatgtcctcatattgagaaagaagatagacatttcagtaatatggtaaagaaatgcaaaagatttattgacatgtgccttttataatccatttatggagggcaacatcaggaaaatatgaaagaacacaaagacatgatttcaattccaaacactgacaatgaactttaaagtttacaaatccaaaaagctggatgaccttcttaacatacaaaacaggaaaacacctcctattatgctgtctttttccaaaatctctagaaatcatcttgtcctcctacagcagtggaaagcttccatctatgtgcttcatgcagaagatgtatgatttttgcatttgtttatccgattttccatgagcttaatctgaatagctatctaatttattctctgaggatagagtaaaacagcttgtctcttttcagaaaatatgtggactgaattatttatttctaacttcttaagaagcttataaaatgcaggatgaaaggtcaggattaattaaggaaaatggtgtgaatttcagcagaagaaatgtatgttaattggcagaaatctgctatagctattaccttattgatattcagcaaaacttgactggactgaaaagaagagccttatttttaacagattgtgggttgtgataatgttgattttagttctgaggctcatacactttttagaagaatatttttcctcgagagtggctctcactgacagtggtgtttcccttcattgtcaaaggcaatggaaagccactgaaaacactagcagaaccattaaggcagatggcccgggttgtaaagagaaaggcaggattcaggaagttgtagccatacctcataactccccatgttctctaaataatgcaactttaatgataataccttttatgctaaagagaattcagcgtgtcttcccatccatttagaggtaagcgtctgttctgactgctgttcattgggttaatgcaagtggtcaagactgagtgcggatctgggaatcagaaaacatgagctctgcttcttgattagagtctttactttctcttctctatgtgcacttgtccagagggcatttagacttgaatgtattacattacttctttaaacaacgtatctcaaatcaacctcataatcttccctgcaaagatgaattttctttctagtttcccaaccattcattttattttaataaaacattttgccagttattgtcccagagttggaggaataaagaaaaatatgcaagtgaactgtcctcagggagagtactatcaaatacagggagataaacatgtagataaatgcaattcaatacagtttaacatgttatttgatatggtttggctgtgcccccacccaaatctcatcttgaattgtagctcccataattcccatgtgttgtgggagggaccctgtgggagataattgaatcatggggggcggtttcccccatgctgttctcctgatagtgagtaagtctcaggagatctgatgtttttataaggggaaaccccttttgcttagctctcattctctcttgcctgctgcaccttccaccatgactgtgaggccttgttagtcatgtagaattgtgagtccattaaacctctttttttttataaattactcagtcttggatatgtctttatcagcagtgtgaaaatgaactaatacattatatggtatgatagaaatgtataagaagggtttaactcttccagtccttcagcccctgtatccaatctgtcaattttagtaattcttccttaaagtgtcggtttcattttactaaaacaaatataagctctatgaaagcaggaatggtgcttgaacacgataggcactccgtaagtacttattgaataaacttgttgatgccgaaatagtggttagaacactagagattccaagtaaatatttgttaaatgaataaaaatgcactctttccagtcagaaataagaagttatcattacctattgcttaaattattgaagaaactgggatccttaatcctagcttttccctttgcccatatccaagagcaaaatcactaagtgcattgcccctaagcaactagcatctaatacaagtattgtcaaactttttatgtaaagacccacatagaattaatttcaatatagtgacccatataatctcttttgctactagttaatttggtctgataatgtgaaagtagctatagccaatatgtaaacaaatgagtgagttagatgtgttccaataaaactatttacaaaatcagacagtgggtctgattgggctgtagttttctgacccctggtttaaaagctattctgaggttcacaagccatttccataaactttattttattagatgtgtatgacaatattataatggttttgtctacttgttcaacaatcagtaattgatcttatatgtgtaaggaattgagttacgtactaggaataggaaaggaataaggcaaaattcctgtcctagtagaattcataattgaatataaagagacaaacctttaaacaggtaattactacacagtgaggtaaatactgtattaagagtacatacagagtaaccatcacctaaataatgtacattgtacccattaagtaatttctcatctcttactcccctctcactctttcactttttcaagtctccagggtctattattccacacactgtgtccatgtgtacacattattaatctcccacttacaagtgagaaaatagtatttgattttctgtttctaagttgtttcacttaagataacggtctccaattccactcatgtttctacaaaagacatgatttcattcttttttgtggctgaatagtattccaatagtattcaactctgcatatatctatatatgtatctataaaatcatatatctatctacatagctatatattaatatatacagaatatatatatctagatagatagatagatacacaatgaaatactagtcagccacaaaatgcagcaatagataaataataaaagctatagatatatagacacagatatatggatatttgtataccacattttctttatccaaacgtccattgatggacacttaggttgattccatatctttgccattgtgactagtgcttctagaaacatatgattgcaggtaacttttcctttgggtagatacccaatagaggaattgctggatggaatgatagttctatttttatttgtttgagaaatctccataccgttttccatagaggctgtatgaatttgcattctcaccaacagtgtgtaagtgttctcttttctccatgtcctcatccacatttattgttctttgtctttttaataacagccattctggcaggcataatatgatctctcattgtggttttcatttgcctttatctgatgatcagtgatgttcagaatgtttttgtatgcttgttggccattcgtatgtcttcttttgaaaaacaagtatattcatgtcctccaccaactttttaatagaattatttgtctctttttgttgagttgtttatttgtagattttggatagcagtcccttgttgaatgggtagtttaaaaatactttctcccagccaggcgcagtagctcatgcatgtaatcccagcattttgggaggccgaggtgggccgaggtcaggagttccagaccagcctgacaaacatggtgaaaccccatctctactaaaaatataaaaattagccaggtgtggcggtgggtgcttgtaatcccaggtactctggaggctgtggcaagaatctcaaaaaaaaaaaaaaaagaaaaaagaagaagaaaacaccttagtgtgttctaaacagcagaatatactgtggaaaatgtaagatatatcagataggacagttttaccaggattagactgttgtttatgggagtgggttagaatgggggagttgatttttgttgagtggtgatgattttgaatgtcaatgattagctcattgaatttgatacaatgagaaaatggcagctgttaaaatttttgtttgttttatataaaaagatatattttataagtaattatctgagccagtatataagactgatagaaagacaaagaaaatgggagtagctgctcaatactaaggcatggagttgtccaggcctgagtttctaaagttgggcagtggatgtgagaacatgaaggaaggaatagattgttagcttgtgagaatgcatgcacctagctagccctgaagttgctagtaacggccagccacatctgatcctcagattgcttttgatggactggcaaactgtcttaagcaatgatttaaaaatgtcattgccaataataaatattgagataatttgcattttaatgaatcaaattttatgacttgttatgagggggaaagattggagcacttggtctgtgatgccgtatggaaaccactagcagtagttgaatgcaagttttcactttagaggataaaacgtcaggtctgagtgtttctccaccattgatgcacatcagaaacatctggggatattttaaagtacgaatcccaaagtcaagtccccaggcaattaaatcaagatctctaaggacaagacccaggtgtgtaaagctgtttgagtcactataaaggcatattggaggctgggtactttatagagaggtctaattggctcatgattgttcaggctgtgaaagaattgtgatgccagcatctgcttctggtgagggctttgggaagcttacgataatggtagaaggtcaaaaggaagcaggcacatgacatggcaagaatgggagcaagagagaaggtggggaggtgccgtgatcttttaaacaagcagaactcacatgaactcagagtaagaacccacttattatcatagctaagacatttatgagggacctgccccagtgacccaaacacctcccactaggcctcatctccaacactggggattatatttaaacatgagatttggaggaaacaaacagccaagccatgttattccacccctgggatccaaacctcatgtccttctcacattgcaaaaacacaatcctccgaagtcttaactggttctagcattagctcaaaagtaccaagtacaaaatccaaagtctcctctgagactcaagtcaaagtctttccatatgttaacctgtaaaataaaaaatgagttatttacttctaagatacaatggtgatacaagcattgggtagacattcccattccaaaagggagaaatcagccaaaagaaaggggctacaggttccatgcaagtccaaaacccagcaggacacatattaaaccttaaagttccaaaataccctggaatccgtagcccactgggcacactggagcaagaagtgggctcctacagccttgagcagctccacccctatggttttgcaaggcacaacccatgtagctgctctcacagactggagttgagtgcctgtggcttttccagcctcaggatgcaagctgctggtggctctaccattctgaggtctggagggtaatggctcccttcccacagcttcgctaggaaatgtcctttcaagaactctgtgtgggttaaaactctacatttcccctctgcattgccctatagagtatctctgtgggggctctgctgctgcagcagacttctgtctgggcaccaggcttttccatacagcctctgaaatctaggtgaaagcttctaaacctgattcactcttgcattctgcacatcttcaggcttaacaccatatgaaagtcaccaaggcttatgggttgtgccctccagaggtttggcttgagctgtaccctgagcccctttgcgtggatgttggagctggaataagcaggatgaggtgagcagcgtcctgaggttgtgcagggcagtggctccctgggcctggcccctgaaaccaacgtgagatctgaaggggacaaacatccaaactgaatcatcaagcattcataatgttaaaggttctgacaacttcctcttctaggaagatggagtagacatgcttttgttgtattccatctgctatgtacaaccaaattcctagatataatatgtaaaacaaaacataagaagattctaaaaggaggagagaaggaggcagcgtggctagggactttgagacccaataaacaacacaatgatgagttccctgggtgtttatgttgcgtcacattatcccagatttagggctgagaaaggtggcaacctggaaacaccctgttaaaattcttctattttgagcctaagggccaggaaaagggtaacccaccaagaaactaaatctttagacagaccttctctactctgtcaacatgatctgatgttaagtgtggcaccactttcacccatatcagcaaaagccaagtggaaacctatacttccccctttgtgagactataatgagacaccccagcaccgccacctgggtggtgtcagataaagccaagcaaagcgctaaaacagttgtactatgaggtggtaacatgtctgcacctactcacatagtatcaggtggagaatatgtgtgaggacctgtactcccacctagcattaataagataccctcatcttctccactaggatgatgtcaaagaaggcctagtggaggtgcaggactttcaccactttcaagtggtaataaggacatgccattcccgttgtctacagacatcgcaagcagagttggatctttcatctctgcctagtgataatgaaaagcttgtataaatggatggtgagtggtgaacctgaacttctacctctacctggcagtcacaaggaggtatgtcacagtttcccttactgggtagtatcatgaagagtcagctaaaatagaagttataaataagatttagactctcctaacataatataaaaatgtaaagatttcaagaaagaattacttatatgaaaaatacagaaaatccccatttcattttattttgtaacattagtaatttgtgtctttttcctccctgtgagaggtttgctgatttattttcttttttaaaaaatcaaatttttgtattgattttatgaattaggtcctgtcaatttatttaatatattcacttgtctttactatattctttcttctttttgccttgcatttatttttctcttctttttctaggttctcgaggcaggagcttagattatttattggagactcttcctcctttctaatatgtacattaattgctatgaatttccctctcagtaccccttagccatgtcccacaaattctgtatttttgctcttctttgagacttcctcctagacccctggattatttcgaagtgtgttgtttagtttccatgtgttttgatattttcctatctttctgttattgatttctagtttgattccgttgtgatcagagaacacagtctgcatgatttcaaatttttaaatgcattaaggcttgttttatatcccaggatatgttctatcttggtatgttttcttaggatactagaaaataatgtatattctgctgttgtgggtgcaactgtgttatttggtacatttaaatttaggatttctatttcatataatgataaatgggtcaatctactaaggagaaatagaaatcctaaatttaaatgtaccaaataacatagttgcaaatatatgaagcaaaaccgatagaactgaaagaagaaataaaaaaatcaaaaattatacttggagacttcaacatccctctcttaacagatgacagaacaggaaaaaaatcagcaagaacgtggaactcaataacatcataaccaacaggaactaatacacttttataggacacccactcacaacaggctctcattctgtgacccaggttggagttccatggtgctatgaaagctcattgtagccttgaactcctggcctggagtgatcctctcacctcagcctcctgatactgcttgggactacaggctagtgtcaccacactgggctaacttttttcttttttttttttttgtagagacagggtcctggctcgctagttggcaacagggagaagcatgcaagaacagggtttgaaatgacatcagaaccaaggtatagcttgcttatgcaatagcaaagtgagaggaactagcaatgtactaagcacctacaaaataccagtcacttgatgattttattacacttaattttcaaaaatttctctataataaatattctcattcttattttataggtgaagaatctgagaatgagatgttttcccagtgatagagtgggatagaatgataggtgatagagtctgaatttgaatttagatcttgctgactcccaagtatacattgttggtgttacacttggattcaggagcaaggtatatgcttcctgccaaggaatgagtcctgaatgtgctttatcccataggtatggcaggatgcccccaacagctagcagtctgaaagaatgacactagtgccaaaaatataattgagattatattgggttggtgaaaaagtaattgctgtctttaccattaaaaagtaatggcaaaaccttcaattacttttgcaccaacctagtaagcacattgggagaattttaagtttgatatatttttatgaaaagttttaataagctttgtaatgtctttattgaaggccaaagtactactgtagtacaaaagaaggaaaaggttgttgatatattctctgttttcttggcgttttatatgtactttttttttcagcaaatggtgctgagaaaattggattgagatttacagaagaatgaaactagacccctatctctcaccatatgcaaaaattaactcaagataaatgaaagtcttaaatataagatgtgaaactacaaaaacactggaagaaaaccttgggaaaactcttctggacattggcctaggcaaagaattcatgactaagaggagctcaaaagcacaaggaacaaaaacaaaaatagacaaatgagacttaaacaaagaaacttatgcagagccaaataaataatcaacagagtaaatgtacaacctgcagaatgggagaaagatccccacccctagagggagtcttgctctgttgcccaggctggagtgcagcggtttgatcttggctcactgcaacctctgcctccgggttcaagcaattctcctgcctcaccctcccaagtagctgggactacagtcgtgcgtcaccacgctcagctaatgtttgtatttttagtagagacagggtttcaccatgttggccaggatggtctcaatctcctgacctcgtgatctgcccacctcagcctcccaaagtgctgtgattacgggtgtgagccaccgcgcccagccatgctctcttctttatctcatcttttcagtcattctacttgaaagcatagactaagtaatgccttcttatggatgacttccttgatgtccccaaaaataagtcacatattcctgccctggaacacaaaatatattttataaaaattacttaatggtagttctttttgcttttcattatgctttacatctcttgaaaacacagattatgctagcaaagctagagaaattttaaacacctaacagacatatttcatattaacacacaaatacacacatttatatacaataagtatgtcctttaagagattgctgagttttagacttaatcttcaacttatgtacatacacatatcacatatacaaataaaagtgtatatgtgagtgtaaatatatataattgtatatgtttatatataatttacacacacaaacacacctgcatcctgagtagaaaaccaaatccacttgacaaatgtaaataatgtcttcttatttaactaacttttcaaggtgtatcttactttctaaagccagaatattttgaaacaaaagctgtttttcttcttgaagagacagatttataagtttatattctagaaaatttttctctatttgatttatctggatgcaaaccagtttgctctggggtttcagaacatcaaaaattttattttccttatgggctgaaagttcatggggatgataagcattctatctcttttattgattttatgataaacagtccaatttaccatactttctccaaatagtcatgctatccctttaggcactgtgccttctaattgttaagaatgctgaccttatccaacatattttggaggaccataagagtttgtgaaaccatttcattatgaaaaatagttaaaataacttacctacttagattgaagagtagaaaactgaaaaaatgcatttattctgaataaaataatggagtataaagtaataaatctgcatgcagtggactagctgagttccacagcccagtagcttaatgttctaaacacatataactttattgcattattgttaaattgctggcttttagaaatcataacctaaattaagcatagtaacatttttaaattgttcacaatgaatttctcttaaaaatcaattttgtatttttttcaccatgaaggggactcaataatctagccctacattgcctaatgaattttatttatgcttccgttcttgaataaaactacttcgctggacacttattcaggtaaattgcctcaatgtaccctgaatcgattaagaaactcactgctatatttgtttaaagatgatttttgcaagatactgtgctagataatgcagccaatacaacacaatcatactgcaatacagggtcttagagactactataagagataaatcagtgttttgagataggcataaagaaagtatttggacttctttcaacgatttaaacctcactttggctctcacacagtaattatataattacaggaaataaacaaataaataaatgtataaccatatgtgaaaacagaaaaggttaggtaaatgtatgaaaaatcccagaaagatatttaaagaattaggaaactgcaaatgaaaggggcaattgtggagagcattgcaagtaagcaaggtggctggatataatatcaaaatataaaatagtttttctagagagcagcaataattaaacatttaaaaggtaataatgtaataataaatatcatttgcaaaagcatcaagacatttaaaaacagtaaagtatctaggaagaaacataacaaaatggataagaaatttatgggaaaaactataaaactctactgttattattattattatcattattattattattgttagagacagggtctcactctgttgctcaggctggaatgcagtggtgagagcacgtctcactgcagcctcaatttcctgggctcaaataatcctctcgacacagcctcctgagtagctgggactacaggcatgtggcatcacacctggctaattgtttaacactttgtagagacagggtttcactgtgttgcccagtctggtctcaaactcttggcctgaagcgatgcccccacctcagcctcccaaaatgctgggattacaggtgtgagccatggcactcaacctataaaacactatttaggggcacacaaggagacgtacctaaatagacaagtttatgtttgtatatgagaaaatgtactattataaaaacatcttttctaccaaattaatcagtaaattaattgcaatctccattacatttccagcagaatttcttaccgaatttgacaagctagttataaatttcatatggaaaaacaagtgtgcaaaaatagccagaacaattttgtaacaaaagaacaaagagaagtaacttcttccttacccctaggtttgatacatttttatgaggcatagtaatttcaacagtaatgatactaattcagaagtagacatatagatcagtggtacagaagaacagatccagaatcagatctgagaatatgggaatttagcatttgataagcataacattttaaattgacagggaaaaggcaaacatttcaaaagtatcaggacaaatgactaaacacgtgcaaaaattaagttagattcacacctaacacttctcataaatgtaaatatggagtaaatttaaaaattaaaaagaatataaattattaaaattaatattaaataatatattcatgatctttatagtagaaagggatttattaaactctaaattatgaagtatatcattgatgcatttataactatataaacattttaaatgttacaaactcagtgtaaaagtttgagaaaaatatgtataatttttaaagaattagtaactagaagtatttttttaaaaaacaaaagctaattagaagactggatataaacagaaaatgcactggagaggtcaaaaaacaaaaaagatatacaacctcattagtcatcaaggaaatacaaattaaaccaataatataattttattttctatttatcacatgacaaatatatagaagtttgatagcagaaagggttggcaatggcaaggatagatataatttgctggtgaaaagatgaattcgttctgctactttggaaggcaatttggcaaagtctattaaatttaagttgtgcttgacttcactacagtagaaaaacatcacgcataagtacaaaaagattgtacaaaatgtatatttttatattgctttcattgtaaaaaattacagtagatatgaatgtgctaactacatattattaaatgttagatatagattattatatgtttaatttaaaataataggtttggataaatacactgttatagtcaaactatgaaatgctgtagttaaaaataataaagtacttctatatgaactaatgttaggtggatctccaagaaagaggcagaacaatatatatagctagattcaattatgtacagcacacacacaaacttaaatatatgcacataaataatataggaaagttttcttatttacacagctattgtgtgtttatgcttgtatgtaaataaatcaaacaatttcaagaagaatatacatgaagttgagaaggaggaaaccagtattagaaaaagcggagatgccactgttcttgttcacaacacataaaataataaaacaaagatctctgccctcatagaagttacattctatcaaggttgacagatgacaaaacctaaccataataaataaatcatttaaatggtgcattagaaaggaataatggctgtaaaaaaagcaagtagaattacatacacaagcatatttgtgtctgggtaagcaatgaaaattttatttgtatgtaatttatttgtatgtaattatttgtatctaattttatttgtatattatttgtatgtatatgagtgtgtgtgtgtgtatgttgtgcatactgactccaattctacaactgtatatattattctgcttctttctaaagatctcaaatccaaaaggaggcagtaataacagttaatttttaatatatatatttttaaaaattgcaaagttcaatggaagttggaggaggaaaaagtttcatggaagaagtaacgcttagaataggcttcaaataatgtttttgatagagtaatacacataagagtgatacacataaggaaatgtgagtgaagtttagacagaagaaattgagcaaagcagaaagtcagtcaacttttgctttaactgttattcaatataaattgcttactttcttcattttagtctttcctactatcttttaaagcccttataccagttatcttctctcagcttcaagctcagccttctctatttgggtatttgatcctggaactgggactctgcaaacatatttctcctttacctgctggttccatgcttggctctgccaaaaagaggcactagaggaaggaaaaaagggatcactccttcctccccctgcaccccctataactggcagtatcacttcattctcttcattctggcattaacagttatttgcaaaagcaacagttgaattcagattaaaattgttctaactcttgcagaaccaagcctcatcatgcccccttcatgtgcaccagctccagtcagaactctcctcctcaaaagtctaggtcccagtgccatgacaccctccttcaggtcaacagctcctgcaccagttctgcaaagccttctcctcaaaagtcttgagtttcactccatggaacgtctcctcttccaacctgttaggttttaatgattccaaccactttcttttgattctgaagccttaggaaactgtctgctttccaacaatgctgccactgtgaaaccttagagttcattttatctatcccaatacctagttaacaactttatattgctcaaataattgacaggactctgattaattcaaaaatatttgagatccatttttttctttggatttttccctaaaaaacatctttttgaaataaggccaagaaaatatttacattattcattttgacagttcatttattcaacatctgttgagtacctgtaatgtgtcagacactgtgttaaatgctagagatacaaagaagggtaagacccagtttctttctctaaagagttcacagtgccatggggaaatacaaatgcaaacatgtaattgcaattacaagattgcaagtgtcataataaaaaatacaaaaataacacacattagggaataactattcaaggggctcaggaaaagtggttccatctgagtacaaggaatatgcagacatttagcagacagctggaaggagtgcgggtactcaaggaaacacaattttttgcaactatctagtatgaacaaataatattggttaactaaaaaataaattgcaaggatggtagtaaaaaagaaaatgtgaagaggtatactagataacagaagtttttgtaaacatgcaagaaacttttagctttattctttaggccagacatatttaaaaaataactcattgcaatcatctaaaaaatgaaacttcttccacaatggttgaactagtttacagtcccaccaacagtgtaaaagtggtcctatttctccacatcctctccagcatctgttgtttcctgacttttaaatgatcaccattctaactggtttgagatggtatctcattgtggttttgatttgcatttctctgatggccagtgatgatgagcattttttcatgtgtctgttggctgcataaatgtcttctattgagaagtgtctgttcatatccttcacccactttttgatggggttgtttgattttttcttgtaaatttgtttaagttctttgtagattctggatattagccctttgttagatgggtagattgcaaaaattttctcccattctgtaggttgcctgttcactctgatggtagtttcttttgctgtgcagaagctctttagtttaattagatcccatttgtcaattttggcttttgttgccattgcttttggtgttttagacatgaagtcctcgcccatgcctatgtcctgaatggtattgcctaggttttcttctagggtttttatggtttcaggtctaacatttaagtgttaatccaccttgaattaatttttgtataaggtgtaaggaagggatccagtttaccgttgtggaagacagtgtggtaattcctcaaggatctagaactagaaataccatttgacccagccatcccattacagggtatatacccaaaggattataaatcatgctgctataaagacacacatacacgtatgtttattgcagcactattcacaatagcaaagacttggaaccaacctaaatgcccatcaatgatagactggaataagaaaatgtggcacatatacaccatggaatactatgcagccataaaaaaggataagttcatgtcctttgtagggacgtggatgaagctggaaaccatcattctcagcatactatctcaaggacagaaaaccaaacactgcatgttctcactcataggtgggaattgaacaatgagaacacttggacacaggaagggtgacatcacacactggggcctatcatggggtacggggagggggagggatagcattaggagatatacctaatgtaaatgatgagttaatgggtgcagcacaccaacatggcacatgtatacatatgtaacaaacctgcacgttgtgcacatgtaccctagaacttaaagtataataataaataaaaaaagaaaaaggaaaaaaaatgaaacttcacacaaatttccggcttctcttgaaatatcagaccatttgggttcaccgggcctgcattttatactttgagaagtggctggtactaaataattactactctctgtagatgaaacccatgcttttcaggtggtcaaaatatgcttgatgatctttttattaaattatttaccttgatgacctctgcatacattttctaccctgctttattaaatgagaaatatttaagcctgagaattccatgattaaatgaatggtttagaaaaattactggagatgatataggagatagctcagattgggaatagatcagaaagctggatggtgacactgtcaatgcaattctgcctaaagcctttaaagaggcaataacaatgaggtggaaataaatgaactagatttgataaataaatgaaaaactaaatggataacaattgggaaaacaatcaatgggaaaaggcccatacatgagggttcaggatgagaaggataaatgtatctattatttccagagtttctggtgttgctgtccagtattaggaataatggaggaaaaggatgtttgggcaagtttagatttcggtgctttgatttgaaatgtctatgggatttcgagccagacgcagtggctcatgcccgtaatcccagcactttgggaggccaaggcgggcagatcacctgagatcaggagttcgaaaccagcctgaccaacatggagaaaccccttctctactaaaaatacaaaattagccattcacggtggcacatgcctgtaatcccagttactcgggaggctgagaattgcttgaacacgggaggtggaggttgtggtgagccgagattgcaccattgctctccagcctgggcaataagagcaagacatcaaaaaaaaagaaagaaaaagaaagaaagaaatgtctacaggatttctaggtggaatgtctactaggaagttggatacaagtctaccaatcaataaatgtgattcatcacataaacagaactaaaaatgaaaaccacatgattatctcaatagatgcagaaaggactctcaataaaattcaacatctgtccatgttaaaaattatcagcaataggcattgaaggaaaatacttcaaaataataaaagtcatctgtgagaaacccacagacaacatcatactgaatgggcaaaagcagcaagccactccccttgaaaactggaacaagataaggatgccgtcttgtaccattcctattcaacatagtattggaagtcctggccagagcaatcaggcaagagaaagaagtaaaaagcatccaaacaggaagaaaggaagtcaaactatacctgtttgtagccaatatgattctatacttagaaaaccccatagtatctttccaaaagctctttgatctgaaaaataacttcagtgaagtttcaggaaatgaaatcaatgtacaaaaatcaatggctttcctatgcaccaacagcatccaagctgagagctaaatcaagaatgcaatcccatttacaattgccaaaataaaatacaataagctacctaggaatacagctaaccaaggaggtgaaagatctgttaaatgagaattaaaaaaataagacatcagagatgacacaaacaaatagaaaagcatttcatgctaatggataggaaggatcaatattgtcacaatggccatactgccgaaaggaattaatggattcaatgcttttcctatcaaactacaaataacatttttcacagaattagaaaaaattatttaaaaattcatatggaaccaaaaaaagagccagcatagccaagacaatcctaagcaaaaataacaaagctgaaggcatcactgttacctgacatcaaactatatgacaatgttatagtaaccaaaacagcgtagtactgatacaaaaacagacacatagaccagtggaacagaatagagagctcagaaacaataccacacagctacaaccatctgatcattgccaaagtaggcaaaaataagcaaggggaaaggattctctattcaataaatagtgctggtataactggctagccatatgcagaagactgacacaaccttttccttacatcatatataaaaatcaactcaagataaattaagtacttaaatgtgaaacctaaaactataaaaactctggaagacaacctaggaaataccattctgaacattgaacctgccaaagatttcatgacgaaaacatccaaatcaattgcaacaaaaccaaaaattgacaaaaggaacctaattaaactaaagagcttctgtacagcaaaagaaactatcaacagagaaaacagacaatctacacaatgagagaaactattttcaagctatgcatccaacagtggtctaatatccaacatctataaaaaacttaaatttacaagcaaaaaataaacaattccattaaaaagtgggcaaagaacatgaaaagacacttttcaaaagaagacatagctgcagccaacaggaatgatagatgctccacatcattcgtcattagagaaacacaaagcaaaatcataagataccagctcacaccattcagaatggctgttattaaaaatcagaaaataactgtattagtcagggttccctaatgggacagaactaatagaatatatatatcatacatatatgttaaatatatatgataaatatatatcgtatatttacatatttaaataaaggggagtttattaagtattaacaagatcacaagttcacacaacaggctgtctgcaagcttgaggagcaaggagagctagtccgagtctcaaaactgaagaacttggagtccaatgtttgagggcaggaagcatccagcactggagaaagatgtaggctgggaggctaggccagtcttgccttttcatgtttttctgcctgctttatattcactggcagctgattcgattgtgcccacaagattaatggtgggtcagccttccccagcccactgactcaaatgctaatctcctctggcaacagcttgacagacacactcagaatcaatactttgcacccttcaattcaatcaagttgacactcagtattaaccatcacagtaacagatgctggcaaggttgtagagaaaagggaatgcttaaacactgctggtagaaatgtaaattagttcagtcaatttggaaagcagtgtggtgattcctcaaagaacttaaaacagaactactggccaggtgaggtggcttatgcccataatcccagcactttgggaggctgaggcgggtggatcacctgaggtcaggagttcgagaccagcctggccaacatggtgaaaccctgtctgtactaaaaatacaaaaattaaccatgtgtggtggtaggtgcctgtaatccctgccacttgggaggctgaggcgggagaatcacttaaacgcaggaggcagaggttgcaatgaaccgagtgttactgcactctagcttgggcaacagagcaaaacttcatctcagaaaaaaaaacaaaaaacaaaaacaggattgccatttgacccagtaatcccattattgggtgtatatccaaggaatataaatcattctaccataaacacatgtgaatacatatatttatttgagtactattcacaatagcaaaggcatggaatcaacctaaatcaatggtagactgaattaagaaaatagggtacatatacaccatggaatactatgcggccataaaaatgaatgagatcatactctgcagcaacatgaatggagctggaggtcattatcctaagtaaaccaatgcaggaacagaaaactgaatacggcatattcttatgtgtactgggaggtaaacaatgggaacacgtggacacaaaaaggggaacaacagacactggagcccactttaggctggaggatggcagcagagagaagattttaaaaactacctatcaggtactattgcttattacctggatggtgaaataatctgtacaccaatcccctatgacacacagtttacctatataacaaacatgcacatgtatgcctgaacctaaaagttaaaatgtatactgttagagaaattcggcaaatgttgttagaagtattgaaagtaaaaaagtcggaaagtcaaaagtgcacagaaatgcaataaaaaccgtaattctaacataaagagagttctgataataacagtttatatgacatagtttacatgtattgattttttggctcatggttaaaggtacaagtttcaggcgaatcactcatcataaagtgtttgattgcttcaagattttcagtaattttacaagggtggtgactttgatgctcttccttaggcatatatgacaatgtctggagacatttcagtttggaatcaaatacataggaactagagattctgctaaacatcctacaatgctcagaacaaccccccacccaaattaagaattatccagctcaaaatattaatagcgtaaggtcataaaaccctgtgctggacttatctgatctcaacatggatgaatattttgacaaagtgatccatgtttttgtgtgaatttaaaggtgtagattaaatacttactcaaggactacagactctggcatcaggccatcctacccgtgggcccaggcccaaagcccacatgttaaagatccctactagctagtccatcgaaaatatctggccaggatgacaggtgaagggctttccatgtcaaagtcagtctgtaaagactagaagagttgagtatttcttcaaatgcagaggcatgaatgcaagtttacaataatcacgaagaaccagggaaacatgacaccagcaaaggaaaaaaataaagctcaaataaaccattctaaggaaatggagatgtaaccattgcccagtattgtgtctcaagaaacaagaaataaaggacagccttaacttaggggatggaaggaaataataaatattagagaaggaataaacaaaatagagattttgttaaatattaaaaaataaattttagggtttgttttgtgaaaagataattaaaatttaaaaactcttatctacactaacttaaaaaagaagagagaagataaaatcagaaatggagaaggcaatgttacaatcaatgccacaattttttaagaaagagattataagggactattatgaacaatcatgcaccaacagggcaacctagaagaaatgaatacattcttagaaacatacactctgccaagactgagtcaagtagaaatcaaaagcctgaacatattaataacaaattagattgactcagtaatcaaaaaagaaaaacacgtgaattaatgacttcatagataaattgtcccaagcatttaaaaacatattacaaatccttcttaaactcttcagaaaaaatagaagagggaacagttctgaaatctttttataaggccagcatcaccttgacactaacagacagaaaccacaagaaaaaacaactaaaggtcaatatccctgatgaatctgattgcaaaaattttcatcaaaatattagtaaacaaagttcaacagcatactaaaaggatcatacgccatgaccaagtgggatttaccccagtaagcagggatagttcgacatatacaaatcaaatattatcatacactccagaaacagaatgaagaataaaaaatcacaagatcttttttgtagatgaagaaaagtcatttgacaaatttcaacaccctttcataataaaaactctaaacaagttaggtatagaaataacttagcacaatcaaagccaaagaggcatacctgtaagaaatttcaggtgcagttccagcccactgcaataaaggaaacatcacaataaagtgagtcacgccggttttgtctatttttcagttcatgtaaaagttatgtttacacaatattatagcctattacatgtgcaatagcattatgtctaaaaaagtgcatagcttaattaaaaaatactttcttgccaacaaatgctaatgatcatctgagccttcagtgagctgcaatctttttcctggtagaggattttgccttcttgttgatggctaatgactggtcagggttgtgatagctgaaggtagagatggatgcagaaatttcttaaaatgagacgacaataaagtttgccccataaattggcccttcctttcactaaagatttctctgtaatatgcaatgtgtttgaaagcattttacccagaatagaggttctttcaaaattgaagtcagtcctcttaagccttgtccttgcttcatcaattaagtttacataatattctaaatgttttcttgtcatctcagcattgttcataatatcttgaccaggagtatattccatctcaagaaacaactttctttgcttattcataagaggcaatttctcatctgtttaacttttattatgagattgtcacattcattcacattttcaggctccacttctaattcttatttctcttgcaatttccaccatatctgcagttatttcctttactgaagtcttgaacctattaaaattgtctatgaggattagaattaacttcttccagagtcccttagatgttgatattttggcttactttcaaaaagcatgaagattcttaatggtatctagaatgtagaatcatttctagaagcttttcaatttagtttgctcagatacatcagatacatcactatctatagcagctatagaattataaaatgtatttctcaagtaataagacttgaaggtgaaaattactccttgatctatgagctgaagaatggaggttgtgatagcaggcatgaaaagaacattaatttctttgtacatatctatcatagctcttgggtgaccagttgtattgacaatgagcagcaatattttgaaaagaatcttttttctgagctgtaggtctcaactgtaggcttaaaatattcagtaaaccacacagtaaacaggctttgtttttccatttatgtagcctaggaagagtagatttttcacaattcttaagagctctaggatttttagaatgttaaatgatcattggcttcaacttaaagtcaccagctgtattagcctttaacaaggtagtctttgttctttgaagttttcaaatcaagacatgacttctttttagttatgaaaatcctagatagcattttcttccaatatgaggccgtttcatctacattcaaaatagttgtttggtatagcaaccttcatcaataatcttggctagatcatctggataacttgctgtagtttctccatcagcacttactgcttttctttttactttcatgttatcatgatggctcctttcccttaaaccccatgaaccaacttctgctatcttcatttttttttcctgcagattccttacctctcttcaccttcatataagtgaagagagttagagccttactcttgaatagtctttggcttaagggaaggttgtggctggtttagtcttctatcctgactactcaagctttagccatatcagcaataaaccctgtgttaggccattcttatgttggtataaaaatatctgacactgggtaatttataaagaaaagatgtttaatttgctcatggttcttttggctttacaggaaacatgatgctggcatcttcttggcttctggggagacctcaagaaacttacaatcatgacaggagttgaagtgggagcaggcatgtcacatgaccagaacaggagaaaaagagagagtcagaagaggggggaggtgcaaaatacttttaaataacccaaactcataagaactcactcactcatcacctaggggagagcaccaagccactcatgaggaatacacccctctgatgcaaatacctcctgccaggtcctaacccacaacactggggaccacacctccatatgagatttggtggaaacacagatccaaatcatattaaatctatttcactttcttatcatttgtgtgtttactggagtagcacttctaatttccttcaagaacttttcccttacattcacaaattggctaatcatttggtgtaagaggcctagatttcatcatatcttggcttttgatatggctttctcactaagcttactcatttctagcttttgattcaaagtgagggacatgtgactcttcctttcacttgagcgcttagaggccattgtgggattatttgacctaatttgaacattgctttgtctcagggaataatagtgagacctaaagagagggagagagatggaaattgctggtcagaggagcagtcataacactcataacatttatggattaagttcactgttttatatgggcctggttcatggcatcccaaagtaattacaatagtaatatcaaaaatcattaatcatagacctccgtaacagatataataatattagaaaagtcaaaaatattgtgataattatcaaaatatgacacagagactcgaagtgagcacatcacattagaaaatggtactaatgaatttgctcaatacagcattgacacaaaccttcaatttgtaaaaaaaaacacaatatctttgaataaaatgaagtagcataaaatgaagtattcttgcatataaaaagcccacagctaacattacctcagtggtgaaaaactaaaagcttttcttctaagacctagaatgaagaaaaaatgtccactctcaccatttctattcaacctagtattggaaatcctatacagagcaattaggcaagaaaattttaaaaatgcaatcaaatcagaaaagaaaatatgaattacctttctttgtagatgatgtgatttttatatagaaaatcctaaatactacacacagacacacacacacacacacacacacacacacacacacacacacaaaacctcttagaactaatgaactcagcaaagttggaaaataaaaatcaaatataaaaattagttatatttctaggtactatgaactatctgaaaaggaaattaagaaaactatcacctttacaacttaaccaaggatgtgagattgatgcactaaaaactacaaacactgatgggacaaattaaagcagacataaataaatgaataaatagcccatgttcatgggttggaaaaattcatattgttgaaagtttatgctattcaaaatgatgtaaagattcaatgcaatccctatcaaaatccaaaaggcatttttttatggaaatagaaaaacaattttaaaatttgtagggaacaatgaaagatcccaagtagccaaagcaattttgagaaagaagaataaagctggaggaatcacactttctgatttcaaaatatattacaaaattacagtgatcaaaacagtatggtactggtataaaaaagcacatacatagaccaatggaacagaatagagttcccagaaataaactaacacattcaaattgagtattcctaactgaaaaatcttaaatccaaaatgctatgaggtttgaaatctcttgaaacttggcctgttgctcaaaggaaatgttaattggagcattttggattttagattttgagattagaaatgttcaactgggaagtataatgtaaatattccaaaataaaaaaagtctgaaattggtcccaagcattttgaacaaaaaatactccacctgtgtataataaactgatcttcaaaaaggatgccaagaatatacaatggggaatggatagtcttttcaattaatgatgttggggaaactggatatccatataaaaaggtgattagacctaatgccagacagaaatatactcaaaataaatttaagacttaaacctaagacctgaaaccataaaactttctgaaaagaaaaaagggtaaaaacatcttgatattggcctgagcaatgatttattggttatgacaccaacatacagggaatgaaagctaaaatagacaagtgggatttcatcaaactaaaaagcttctgcatggagaaggaaaaaaatcaacaaaatgaaagggctacctaagtaatgggaaaaaaatttgtaaaccgtatatctgctaaaggattaatttccagaataaataagtaactcctacaacttaatagcaaaaaacataatttaattagaaaatgagcaaaggaattgaatagacatttctccaaaaaatacataccaatggccaacaggcatatgaaaaggtgcttaacatcacaaatcgttggagaaatgataatcatgattactgtaagatgccaccttaccactgttaggatggctattatctaaataaaaaagataaatgttttcaaggatgtggaaaaaaaggaacctatgtacacttttgatgagaattaaaattggtgcagcaactgaaaatctatatgtggttcttcaaaaaattaaaaatagaactaccatatgaaccagtaacttcttttctgggtatatggtagtggcctccctcccgttattcatggaggatacttttcaggaggtccagtggatgcctgaaaccacagatagtaccaaatccaatgtatactatattttttcctatacatacatgtctatgataaagtttaatttatacattaggtaccatatgagatttaaaataatagaaaataataaaatagaaaaattataacaatgtgtcagcatcactactcttgcactttggggatattgttaggtaaaataaaggttacttaaacacaagtattgtgacaccaccacagtggatctgatagcagcgatacctactaagcgactaaggtgttggggacatctgcagtgtgggtatgctggacaaaggggtgatgcattctttgggggactgaagatggataatgtgacatttaatcacatttctcaaaatgttgcccaatttaaaagttaggaattgtttacttctggaatatttcatttaataattttggaccatggtttttacaggtatctgaaaacctgaaaagcaaaactatggataagagggaactactgtacatccaaagaaattgaaattaggatcttgaagagatgtctgcatgtccatgttcattgctgcattgtttaaaatagagaagacacaaaagcagccaaatgtccatcaaaggatgaactgataaagaaaatgtaatctattaatacaatggaatactattcagccttataagaaaggaaatgctgccagtagcagcaacatggatgaatcttgaggacattatgccagtgaaataaaccagattaaaaaaatactatacgatgtcacacatataagaaaccccaagtagccaactcatagaaacagacaacagaatggtaattgctggtgtcttggggaggaaaagtgggaaggcattagtcaaaggctacaaagctatggttttacaagattagtaagttctacagatcaactatatggtacaatgcctgtagttccaattactgtattatatcctttaatatttgctaaactcctgacatggtagctcatccctgtaatcccagcattctgggaggccaaggcaagaggatcacttgaagccaggagtttgagaacagcctgtgcaatatagtgagaccttgtctctacgaataataataataataaaaattagccagtcagtacgtgtactgctgccctaactactcagacggctcaggctagagcccaggagctcaaggttgtgatgagctatcatggtgtcagtgcactcaagtctgagagacagagcaagaccttgtcacaaaaaaatgtgtgaagagggtagatattatgttaaatgttcttattccaataataatataataataaagagaatacaaggaaactttggggagccatggataagtttaaggcatagattgttttgattatttcatgggtgtgtacatatctccaaactcatcaagttgcatacgttaaatatgtactatgtttgtacatcaatcatacctcaatagagtagtttaaaagcacaaatttatattcatattcatattcatagtttataagtgtgtaatcaaccaaaacaaacatttaataccatagctaaaaatctggaaggaggtaaacaggaacggtttctgggaaggagcacattgccatcaaacccatgaactttgccctgcagaacttctatagaaaaatactcatatcctcattcgagcaaattagaaaattagatagtagaatggatgtagtaggataagccaagagccacaaaggaattgatgcttgaagggatatcgtaaaggcacagtgccttcgagtatgttggtataaagacaaaaataagaaacactcattaggccctgtagatattattatatcataatatagtacagcagaaataatattatgtaaagtacatgagtttttcatatagatgatttatctccctttgattatcatttctaaatttatcatttaaaaatttgaaattttgtttcaagccattttcaaatgttcaaatatcttcaatgttttcttaaataaaatatagggaatttaattaacttacttctctctctatatataaagattataatctctgaataccctcacccacatataatatatatagcacacacatatattacaagattattcctttaataattatattaacatataagtacagactgaaagactggttaaaatctaataaatcatacacaaatttttaacagtttgaatcatttatgaatttactatgagtttatgaatttactatgaatatataattgtgagttataatgccttctgaaaacataaaataatgatgatagagatatataaggagttgtccaagtttgaattactcatcaattgttgatacctcccagatgacactgcctaacttcaatcattaaatattgacacttgcttttccttggtaacttataagtatcatttaaaagaaaagcattaaacatgagtctacatacgacaattagtctttagagacagtgaataatacacttcagttttctttaactagtaatttatcattgccaatattagttttactcaagttgtggaaatttgttcctagaactttgttccaattgtctcgaagagaacattttaaatgaagttcgggcagattctctcccattattgtcctattcagaagaagagatttagtaaagagtgagaatcagattagttaattattcagcaaacacagattaaacagattaaatatttttgagttgggcagtgatccctgtagacttgagaacctcacaaggaaaaaaaatgtcacagcttcttcttgttaaattatttataaaatatgcaaaagcagaaaaaagaggaatgaaaaagaaaaagaaactccaaagctctcacaggagcccttcaactcattggcacgtgcataaacatacatgcatgtgcttgcacacaaaattcctacagatcaggacttctggagatttcctattatcaggagactctctgtgctgttgcctgccaagaactctagcacagcggatcaggctataatgacgaagctgttcattagctagcgggtggttaagctaattgatttgggtggcagtgtggtgtagccagagcagaaggtcaacctttggagtcagacatctcttcatctgtagtcatcctgactggactgtctgtaattgcttttacatttttgaacctcagtttcaccaactccaaacatcagcttgaacatcactccttctaaagttacagattgaagtgtcctcagcaatcattttctatttttctttcccctacatgttggtattgttaaaaggttgactcaaacatagaagtgaactctctctctataactaagtagcaaagacactagtcaggaaagaagctagtaggtcatcctcagtctaagctattctaataataataataataataaaagattaactgactattggcttcaaacccagaaaggactgcatctgagtgcagatctcctctggccaactagttgggtgaatctcctgccagggagaagtttatctcaggctgccatgatctaactggaaaagtcttgcgtaattacattagacatattcaggattgggtgtcatgacggatttagtagttgccatttagatcaatgtggatttttcaaaaactgtgttctggagatagtagagccctgcccttaaagcattcacagattcatggagagatagccatacaccgataaattccatacagcacagatttcattagaacgccaagaaaggcaagacccagcatttggtaccaagaaaagcttcctgtaagacaaaatacttgaaaaataatacagacattaaatagggaaaaacaggaaaggacttcaacaaaggatataacaagaggaaattccttttcaatgtgtatattcaggttgtacttctttttttttttttttttttttttttgagactgagcctttctctgttgcccaggctggagtgcaatagcgcatactgggctcattgcaaactccacctcccaggttcaagtgattcttgtgcctcagcctcctgagtagctgggattacaggtgcacacaaccatgcccggctaatttttgcatttttagtagagatgggttttcaccatgttggccaggctggtctcaaactccttatctcaggtgatccacccaccttggcctcccaaagtgctgggattacaggtgtgagccaccactcccagccggttgtacctttaaaaaaatatatattaggttttggggtacatttgaaggtttgttacataggtaaacacatttcaatggggtttgttgtatatattatttaattacccatgtattaagcccagtactcaatagttatctttttctgaagaaaatcacacattaaatttatgactgttgacagattccttaatgctgtctaggaattgctttatagtgttctctttctctctctctctctctctctctctctctctctgtctctcaatctcactcaacactcctctcttcacctagttactccctactcatctttagatctcaggttaaatagccaaacagtgaaatgtctatcatttgggaaacattttctgcccactcagtctaaagtttgagctatgtgtttttatagcagcctctattttcctccatcagcatttgttatagtatacaataactgcctctttagttttcttgcattctctagctctttgagttccacaaggacaaagtctcttttcatcttgtttctccttatgtttttatttttatcatacattgtatgtgtcaataaatatgccaaataaactgatgaataaatgcatagatataaaactacatgaatatatgtgtatacttatgtacttacacacatctatggtgaaatttttatttcttttatttttagtatttccagtttttctagcatgtacttaatgtgccaagcaggaaactaaggtaggcacaaagtggcaggtgtcaacatgaggcaattactggaagtttgtatgaggcacgttcttggctacaggaaacaagttaaatgtccgatgattaaagccgtgtaatatatctgctttactattctaaagattaagctagcacaaaattggggctttgtacatttcttattgagctcaatattagccatgggggattgaaatcatgtgctttaaaagactctgattgcataaattagaatgatggattcagtcatagagacttacacatgtaagatgttttcttttcctctcttccagtaccatagcctcaaccaacagaaactacattcactaaaacgttaactatattctcgtttcctattttctatgtgattgctttggttttgtaaaaagatatcggtctagttccaagaagctccattacctgaaacatctggggaaataagtagctaccttgtttataatagtgcacaaaagggtatcttgcttaataaatttctcttttctctggaagctgacagacacctgggttactaggcaaccactcatttctcacaaccaatgagtatcatatcacacatcataaattgaagaggtatcaatacactgctctccacaagaatgaacaaagatttacaagtgacagtgatagaagcctggaataagaggtgggtgaggggacccagatgaggaataataaatagaccatctggcagacgaatgtaggaaatggttgggaatcttccctcatgctaactgaggggctgcaagcagtattttctcaacataccctagggctcagctcttcacttggtggcaatgactgctgccagctgatgaacaacataccatctgaatatacatcttagccttgtgtatgtaattggcattggatgcaggattgctaagtagcaaggccttctatacatctccccagggtgctatagcctgaggattaagcgaaatggtgtgcaggtcttgtagagtggccaatttgtctaggtgctatgctccatgcactttattaattgaatagtggagaggagagatattcccttcctctaatacttggaaagcccttcagctcagaggtaatctgttttctctggctaaagctctaaagagggtatgtgaggcagtgttctatacaatgttgaaagggcaatcaaggaattggtgagcctcaggaaacaggtctctggaaatgatggggaagtctgaacagacattgtgtaatatttttatgtggagtaatggttttctatgttatgttaaaaagggcaagaattcactataaaatgacaccatgaccctggcaaaagccctgaaagttacactcagagcaatttgtttggggtctcatcccactacattccaagtgatgattgtagcaacaagtgtaaatcctctctgtcccactccccctgttgtcaagttctgataataatgccaatttaaatagtagtgcttttaggctcaccaggagagatatattggattctcaaattaagagatagggttctagcaatagactatgcttatttaattatagtgaataataaaaataaaactcgataataaaaacagtcaatgtattgagctcttactattatcaggcgcgatggtgggctttaaatacataattgtatttagctttcacaagagcccttaaatggtaagtactagtattatcccattttgtagataaggaaactgagacatggaccttggaccttcctaagatctacatgtcagtgaatggcaggaatttgaacccagacaattttattagagaatctatgcattttgctgctttcatttgagcatgtattttttgctttcaaaacctttcacagcagtctgtcaaaactcattactttataaatagataggaggatacattacattttctcagagaatgcttcacttttattttttccttggttgacatatactttttatgatttttaaatttttactttgaaagagtttaaatttacagaagaacacaaagatagttttgagtttttatattgtcttcagctcccttaatatttacattctatataaccatgacccgttgatgaaaaccaataaattaacattgatacgtaccataatgttaactattcaatagtcttttatattctttgatctattgttagaggaaaacacaaacaattccactagcgccaaaaattaaacttaggccaaatctatctacaaatttctctctgatttgcaaacggagatcacattaggaatttggatcctcccaattcacctgatgtaatcactgctgattattatgaaatgaggattcttaatgatgatgagaggaagttgggatgttttgttgcttttgtaagcttttttttctagatgtgctcctttgagccttgctcttaagaaacaggaaacagctatttcatcagacaagtctcctgagaatccaaacatcagtagattatatactatctgtattgtctaatctttttaaaggaggtgtatcctttcccaggttttcccttctgacccatgctcaagacatctgaattctacagataggattaactggactccagcctcttactggattctgccagtggaagagacaggcaggagatgagaggacaagagagagagagagattgaagtatgctccaatatgttctcccaatccaactttttgagctgtagttttggcagtagctgcatcttagattacaggctctctctgacagccatagttctcagttaggctgagataatatagttttctctctgaacttgcaggtcctggcttataatgggtcccactctttctagtgccttggacttccccagctcttgttggttccccttcctctgcccaacctctagaaatagtcacttcattgagatcctttttgataacctttctgagtatgccatctgcatcctgctatgatcatggttaatgtactatatatttaaaatgataacttgaactcttaaatgttcctgtgaaaacatcataaacgtttctattcatttaggtgagcaaattataaacaaacattttccattgcctaaagtatcagtttgaaattcgtacatgaatcctctttaaaaagcatattttagggatactagcatgtccaagattccagtcacctcaaatggaaaggaagcatttaaaaaccctctttgtttcttctttgcctgagcagatatccaccatactagtaacatccttcctacctcatttatctggttaactctacttgtcttaatccagctcagttgtttcctatttcacatggatccaactgctttaaatacctcacctttgtattatgtaataatttttgtagaaagcacaagactcttgtattaataattttaaaaagaaggtgtcacaatatatgtattgctaagaatttatcctaaggaaatagaaatgtgaaaccacattaaaagatattatttgtaatactttaaaaaataaaaacttaacccttctgccttacagaagaaaatgtgatgtgcttgagtatgcaatgaaatattaagcagccaataaaagccatcttttcaaaccatattcgtgatataggtaaaaagtatcttacacggggagaaatagaaaaacagatactgaaagaaacacacacaaaaatgttgatgataataatctatgtacacttggcaggggtccctgcttatgtaactttatttttgatattgaacatgctttacttttaaaataacataaaatctagagtgcaatacactaaataaaaataggatttcctcttttaaacacataactccaacagcccacatgctaccagcacacatcctgagaataaattctaaaattcactttgctggggaatgcaaaattggattgtgaaaaattttgcattgtagaaattgtataaatgaaaaacttgaaagtaggaacaatagtcatttgttccaaatttacctttctgtattttatgtgatgactagaccttttgtaaatctttttcttgctttgtgatccagctgttttgcccaaggttgatgcagcattcaggtcagatatgcatcaagcactctattttgtagatcatgttttatttatggttattgtttccgatgctatttcttctatctttcaactgaatccctgccagagtcactctttaaaaataacaaagtagtgtgaacaatagcaattgtagttagaatatttttctctgtataacagacacaactgacaggaagtgagaattttggcttggcctgaaggctcaatgtaaataaaaatctaaatagctcagtttttttttcttattactaagctctgcctgtgatagaattctttatcacttcagcccttacaggaagaagctgacataggtgccagcctgtgccagaatattcaattaactatgcatcaaggtgacccatttgtccagtgggtgccaaagctgaaatttttttaaaaatccattatttttccaggtgaatgtattagataaacttgcctgccaacaagtcctttctgacttcataattgttgatttgtgatttttttcaaggacccatatgctaatctatagattacagctacaaaatacaataataataatatttgtatgaggcttcagagttcacaaaagtcattttatatatcttgcgtctcataacaattcacattactttaggtaaataatattattgtctccattttatagataaggaaattgagatttaatttagttgaagagcttgtccaaggttactaggcaattgatgaaactggtattcacactagaggctgttagctcttttagggtatgtattttactgtctcatgttgctgtgtaattgactatttataaatgcccatggttgacctcacttaacagttactaattaataaaaatcagtaaattacagttttctccaatagctgcaaattgaaaccctaatccttttaattttatcatttcagaactgtttttgtaacattaaagaattctgagtttcacatattttcaatatctctcacaagtgtctatcacatatttcacatcatcaatcacagatgtgttagtgggaaaagtctcaaagacactcaatagaatgctattctgttagaaaaactgactttgctaagaaaatactgtggtaactattttgttaatagagatatgaataatagtcctccaatttgtatattttgtaagtttaaatgttcttacaacaatggttcataaaatctggatgcttacttttcctaaagctaggaagaaacactttggaatgtgagtggctaaaaatcaaaaggcatgttttgcttactggcaccctgctccatttgagtcatgctgaaaggtcaccaaagaaagagacagtgattagttcatgtcaaagctgagagttgtggtggtttaatatcagtttgaagaggtatgacatttttaataagagaaatattgactttcttttgcttttttattttaattatcagacctaatacaaaatcctacagttttttattctctcccaatcccagaattccttcctatccagtctagatcacagaacataaaactcttcaatcttttgcatcatcacaactctcttccagttgttttccctatcaaaaccaccatccctatcaccacaccatgctccatacccttctctttacctcctgtatatcactaagaaaatagtggatctttatttttattttatttatttttgagacggagtctcgctctgtcgcccaggatggagtgcagtgacgcgatctcggctcattgcaacctccgcctcccgggtacaagcgagtcttgtgcctcagcctcctgagtagctgggtgctatagacacgcgtcactgcgtccagctaatttttgtatttttaatggagacgaggtttcaccatattggccaggctggtctcgaactcctgacctcgtgatccgcctgcctcggcctcccaaagtgctgggactacaggcataagccactgcacccagactatttttaatcaaaactcccttaacttactgcactttatctcctcaccccaaaactcaattgcattttgatctcttcttccttcttagttccatgaaataggcagccatttgctgaaaccatttcttagaagtactttactgggtccaggctcttcaaagaactgttctattagttagaccttttcctttacttcagccattactctctctatatatatctatatatctatatatgcatatatatatatctatatctatatatgcatatatatatctatatataaaaagatatgaagtttatgctttctttggttaaaagacatatattatatatataaagacatatatatgcatatatacatatatatacatatatattttttaaccaaagaaagcataatctgtttccatattaagtcaatttatcaccctgttaatcatatataggtctcgttttagtaatagccctaattctaccaccaaagtattgagtctttatgtactgtcttccttttctcatcacctattcatatttcaacccagatatgatgttcaacctcctagcccctgatcatattcctatgaaagtatttttttttgtgcccttgatggatttcatattttataaaattaaatgaacagattttccttttgaaaaataatacccatttctgatgatgaaatccaacaatatactcttattgtaaaatatttgacatatatgtgaaagatatatatatactctttatcatttttaatgacataaaatatattttaaaatctatttctaatttttaatcttagattttccaattctaagagttttttggtagagtctttatgtttttctagatgtaagattatgtcttcagcaaagaggggcaagttgacttcctcttttccaatttacatgtcttttatttttttctcttgtctgattgctctagttaggacttccagtactatgttgaacaggagtagtgaaaacatgtattcttgtcttattcttagaggaaaggctttcaattactccttatttgggtatgacgttagctgtggttgttacatatggccgttattatgttaaggtatactccttctatgcctagtttgttgagagtttttatcatgaagggatgttgaactttattaaatgcttttactgtgcctactgaaatgctcaggtagttttgtccttgatatagcttggatttgtgtcctggaccaaatctcatatcaaatggtaatccccagcgacagcagaggggcctggtgggaagtaattagatcatgaaggcagatttcctccttgctgttctcatggtagcaagtgaggtctcacaagatctggttgtttaaaagtgtgtagcacctcccacttcactctcttcttcctcctgtctggccatgtaagatgtgcctgcttcccttcaccttctgtcatgattgttagttttctgaggcctccccagccatgtttcttgtacagcttgcagaaccgcgagccatttaaacatttttctttataaattacccagtctcagatatttatgtatagcagtatgagaatgaactaatgagaaaattggtacctaagagtggggcatttctataaagataattgaaaatatggaagcagctgtggaattggttaacacacagaggttggaatagtttggagggattagacaaaaacaggaagatgagagaatgtttggaacttcctagagacttgcttaatggtcttgaccaaaatgctgatagtgatatgcacagaaatggccaggctgaagaagtctcagatggacatgagaaacttattagaaactgaaccaaaggtcacttttgttatgcatttgcaaagaggttggaggcattgtgcccctgccctggggatctttgaaactttgaacttgagaggaatgatttagggtgtctggcagaagaagtttctaaatagcaaagtggcctggctgcttctaagcacctaagctcatatacatgaataaagaaatgatctgaaactggaacatatatttaaaatggaagcagagcataaaagtttgaaaaatttgctgcctggccatgtggtagaaaagaaaaaactattttcaggggagaaattgaagcaggctgcagaaatttgcacaactaagagaaaaggaagtactaatagccaagacaatgtggaaaagattccatttcaggtatttctttataatggtgggacaatggactaatacagtccttcattctgttgatatgatgtatcacatatattgatttgcatatgtatccttgcatccctgatataaatcccacttgatcatggtgtaatatttttttgatgtgctgttgaatttcatttgctagtattttgttgacaatttttgaatctatgtttatcagggatattggcatgtaattttcttctgttgttgggactttgtttggttttgatatcaaggtgatgcaagcctcatggaataaattcagaattccttcttattttatttttttggaatagttttaggagaactggtgttagttctttctatagtatattggaagaatttggctatgaatccatctagtcctaggtttttctttattgtaagacgttttattgctgattcaatctcattacttgttattagtctgtcctaatgagtagaccattaggacacactaataaagaagaaaagagagaagaattaaatagacacaaaaaagggtaaaggggagatcaccactgatcccacagaaatacacactaccatcacagaataatataaacacctttacgcaaacaaactagaaaatctcaaagaaatggataaattcctggacacatacaccctcccgagactaaaccaggaagaagtcaaatccctgaatagatcaataacaagttctgaaattgaggcagtaattaatagactaccaaccaggaaaagcctaggaccagaccgattcacagctgaattccaccacaggtacaaagaggagctggtaccattccttgtgaaaatattccaaacaatagacggagagggaatcatccctaacttattttatgaggccagcatcatcctgataacaaaacctggcagagacacaacaaaaaaagaaaatttcaggccaatatccctgatgaacatcgatgtgaaaatcctcaattaaatactgccaaaccaaatcaagcagcacattaaaaagcttatctaccatgatcaagtctgcttcatccctggaatgcaaggctgtttcaacatacgcaaatcaataaatgtaatccatcacataaacagaaccaatgacaaaaaccacatgattatctcaatagatgcaaaaaaaaaaaaggccttcaataaaattcaacaccctttcatgctaaaaacactcaataaactaggtattgatggaacatacctcacaataataagagctatttatgacagacccatagccaatatactactgaatgggaaaaagcaggaagcattccctttgaaaactgacacaagacaagtgtgccctctctcaccactcctattcaacataatattggaagttctggccagggcaatcaggaaagaggaagaaataaagcatattaaaatacgaagagaggaagtcaaattatctctgtttgcagatgacatgattgtatatttagaaaaacatatcatctcagcccaaaaaactccttaagctgataagcaacttcagcaaagtctcaggatacaaaattaatgtgcaaaaatcacaagtattcctatacaccattaatagacagaaagccaaatcatgatcaaactctcattcacaattgctacaaagagaataaaatacctaggaatacaacttacaagggaggtgaaggtcctgttcaaggagaactacaaatcactgctcagtgaaataacagaggacacacacaaatggaaaaacattccatgctcatggataggaagaatcaatatcataaaaatgaccatactgcccaaagtaatttctggattcaatgctacttccatcaagctaccgtaaatttcatgtggaaccaaaaaagagtccatatggccaagacaatcctaagcaaaaagaacaaagctggaggcatcacgctacctaacttcaaactatactgtaaggctacaggaaccaaaacgacatggtactggtaccaaaacagatatacagaccaatggaacagaacagaggcctcagaaataacaccacacaactacaaccctctgatctttgacaaacctgacaaaaacaagcaatgtggaaatgattccctatttaataaatggtgtcgtgaaaactggctagccatattcagaaaactgaaactttctgaaggaccccttccttacaccttatacaaaaattaactcaagatggattaaagatttaaacgtaagaccaaaaaccataaaaaccctagaagaaaacctaggcaataccattcaggacctaggaatgggcaaagacttcatgactaaaacaccaaaagcaatggcaacaaaagccaaaattgacaaatgggatctaattaaactaaagaacttctgcacagcaaaagaaactatcatcagagtgaataggaaacctacagaatgagagaaaatttttgcaatctagccatctgacaaagggatgggctaatatccagaatctacaaggaacttaaacaaacttacaagaaaaaaatcaaacaactccatcaaaaagtgggcaaaggatatgaacagacagttttcaaaagaagacatttatgcagccaacaaacctatgaaaaaaagcgtatcatcactggtcattaaagaaatgcaaatcaaaaccacaatgagataccatctcatgccagttagaatggaagtcattaaaaagtcaggaaacaatcgatgctggggaggatgtggagaaataggaacacttttacactgttggtgggagtgtaaattagttcaaccattgtggaagacagtgtgatgattcctcaaggatctagaactagaaaaaccatttgacccagcaatcccattactgggcatatattcaaaagcttatacatcattatgctatgaagacatatgcccacgtatgtttattgcagcactattcacaatagcaaagacttggaaccaacccaaatgcccatcaatcttagactggagaaagaaaatatggcacatagaaaccatggaatactatgcaaccacacaaaagaatgagttcatgtcctctgcagggacatggatgaaacgggaaaccataattctcagcaaactaccacaggaacagaaaacctaaaaccacatgttctcactcataagtgggagttgaacaattagaacttacgggcacagggaagggaacatcacacaccaaggcctgtcgggggctgtggggcaaagggagggataccatcaaaagaaatacttaatgtagatgatgggttgatgggtgcagcaaaccaccatggcacatgtatacctacataacaaatctgcacaaaacttaaagtataattataaataaataaataaataatattaaaatatataaatgaaactattatttagagttttctgaaaaaaagagtggtatgttaaatactcttgtaacaattgtgtttctgtcaaaatgttgacacggtctcaatgcatatgttgatgctatatcattaaatgcctaattatactggtatgaattttattttataacagtataaaatatttgaactgcaatttactttatctgatgtcaattttaccagcctttagtttccttttaatcattttacacattttgagtttctctggaccaaattttattgatgtcagtacctctgagcctttggttgtaatgttttgggattcagtaattatgacaaagtcctgtgttgatcagagtaaccactggacttgttactggttttctgttgttcatttggactataaattatctggcactatggatattgccaccctagccacaagtgagatttaatgatactaacacaatataaatgtgaaaaattttataataaaaatacagatttttggcttttcttgaagaatcagaaggcttgagaaattggatgtacctttcctttggtggtaatactgaactgaagctggtttagagccaccccctttatatagaacatgtactctcaagcttgtatcatgcatttgttacctatctggccttatagtcatttttgttttcaatcattgtttatacacttgtagtcactgctactgcatcatcaccatcttttagtactgatttgtctttctttctgtctttgtctgcaactacacatttgtaattcccttcttgtccttgtacttcagagaagcatagcaacccaagtacaacaacttttgccattggatcagagaacacagccctgtttaacgactcttctcctgttaatctgacaaatacctgaattatgtactagatcctaactttcatgtcctaacatttggatgttctagtctttttacttcatctgcctccttaaacttgttctattgccattttcaaattcattctggaaacctgggtttggtcgctctccaccaacatagttctccctcacctatttacaaaaactttatacactttaaaattgactaggggccaacttgaatccattgctttctgcaacagtggtatttataccaactcttttttaaaactttgatttaaaggacagttttctatgttggcctctgcctctgaattggtgagaggctggctcagaaagaggtgaatatcttgactctgtgcatgaagaagtcattactatcattcagtaaagatattctacttcctattgaagttcccaaataggaatcaaaccacccaaaataaaaactataacaatacaattatctgaaaagtgagtatattctctctcctgcatttagagggagttctcaataaacaatcattgcaaaagcaagatgcctgaaatgtttaggcccagggtgtttaacgttataatgggaaatcaagcagaggtgctaaatacagcgctattctctacaactctatcatagatgctcatgtttctgtggcttattttataaggctgtcatgttcaaatttattctgtcaagcagttattttctcttccactgaattgttctatatatctaactacatatccatatcttcatctcttctttttaccactcatctttcaaccatttatttatatttccactatgacacatattttgacagctccctttatattttcattgcttggtttgagctggactgccacattctttttaaagatgtaaggtgccattagaaatagcaccagttgcgtctcttgatcgtcgccatcttcttacccaagcaattttcactttgacacggcaaattatactgatgtacagtgcatatttctctctagtgattgtaattaaaatgggtttcatgggattttataatcagaaaggatgacatgcttggaaataaatgtgtagacaattaactaataattattgatttatatccaagacgttcaaatgtacatggcacatgtgttgtatatgttagtatctttgtatatgctattcattaaacaattcggtattttggtttcagatgtgcactttgcattttgaaagtgtttcccttgatgcttttctttgtgctgcttcattctgtccctctctcacactggctgtttccactgctgctgcctgtgaacaacctagagactgaatctctttgttacaagatcagtaattgctaaacagtgttaaccagaagtgataatggcttattaacacctaagtggcatttctttcagaaaaactaaaagatcacagaagaaggcagaatattgttgagatatatgggcagcctctgagaacaaatacttgctgatgtagactattgtagatttccatacttctttgccttttaaaccagcagcaggtttgttactatgtgaactacatatgcttaatcagtgagtgtttcaaagagaaattagctttgatttgaatttaagagagtgacctatcttgatagatggaaattttttattttagacatttttgaaagctgatgccagagacgataggcagtgaatagatgacctttgtagaaaatactttgtggtctttaacttcctagcacccatgtcccctttctaatgataccctgatttccttttggaaaatggtcttaccaaatattatatatggttgtggtaggtgataaatagagatccttgactcctcaatagaagatccttcttctcactgactggcacataccaggaacaggctcctgatctaagattggctgagtgctgctctctgctaggatactgaatcatgagcaaatgtaggagagaaagaggtggatagtgctcagtcattctagtggtagtgtccctatctgaggattcttttcaaaaattattgctgatgtttctgcattctaggccttttaactgaactgcaagtctgcaatctttccatggtaagacatagcctctcagaaaacacacacacacacacacacacacacacacacacacacacacacaagatacagctttatatgttaacacagaacttaagagcatcactactaaagtcagactgcattgatttcatgctgactttcaattaattagatgactttgggcatgatgtttagtctcctcagttttccatttctccactatgaaataaggataacaaagctgtttatcccaggcagttataggtatataaagcacttagaatagagcctgagatagtacatgctcccaagacttaactatcatcaaattttaatttcattctcttgctctctctctctcatccttaaatacccccacccaattatctcaactaatctttttgcaaagtcttgtaccatccagcttacaactaaatgaaagatatacttaaaatatccaaataagttctcaatgaaacaagtcaaaattaccaagttccttactcagtgaacaagataacatcactattttccaaaacatgcacattgaatattattctgccaaaagttgcactgtggtgaatttgaatgcaatttatactcatttcagccaacatctcaaagaagttactgctgtcataattgagggaccaccttgtcagaaatctcatcttcatagcatcttacagaattcacaacaaaaaaacatcacagagagtccatattgttgctgcttcatcccaagctcactggctattgtggacatattgctgttataaggtggttgactgacttggaaaacatcgggctaagaattaaactgcaggcatggaaaacaattgaaacattctgaggctttttgacatattgagtgtccctatattcaaggttaactctcattgctcaagggtaaagtaaaagaagaaaaactgcagtgatctggaaacccatatccactctttaggagtcataatacttgaaaggaatatttggccattccagttgtttatatattttttattacactttaggtaaaaaagccatatatcctaaaatgctctgagcgagcaaagaaaactgtcctggaatgataactagttggaagtaatttaagcagctggccagttctggtatctgtcagcaaatagcactaataacatgctattcactcagagtctatttgtgagattaatggtactagatagaatattttatgtctttactctatttaccagcatgatgtcagtcagaattaaaatggttttgaaagtgtagaaattccattgtatatattactgagaatatttttcaaggtatttctacaatattagcatgcttctgacacattttgctattctaagaagattcaatactacaaaatacatgagcagtcccatggataaaatgaagagatcagaaagggagaggagtcaaagcactttactatagactcttctgataaagagaaaagttgaaaaatttttccttatctgtttgaaatttaggccgctaattccatagtcattttgtcatatatatatatatatatgccatcgataagttagaaaaataaaatattcaaaaatatttgaaatatatttcaaaaatatttgaaaaatattaaaaaataatagcacattttaatgactaaaatcaacataaagctgatttcaaatattgtaattctcatgccaccaattaaaaaaatacgattattctattttgatgctacaaagcattaggtggatttttctgactcagtatttttatttcttattgcataaaaagtaaagaaatagaatttctgaattattggataagcttagagttggtccactttggcatcaatataccagcaaagacattaagttttctaaaatttaatatttaacagtttcattaatatgaatggcatttccagtaggtcctttaattacattgtttcaataaatataaatgaaacaatactgaattaatattaaaatttgataaatatattttatgagaaagttattataagtacaagataagaaaatacaggataaggaacatgctactaaatgtcattttaacaaatcttcaattacttgcagagagataccgaaccaaagttgacatatttggaagcagttctgtaattcagagaaatgactttatgaagactttgcaagaatatagagatattctgggtgaagagttgaaatatgtgcatttattacaatacttttttgttaggttggtacatatataacctcaacgtactttgcatctcctttcatggactttgctatatttattttactttataatctatctaaaactctatcaccaaaatcttttgaatttctcaagtttattcctcccccatcctcctaaccaactattttaaacgggtctttaccctatcaccactacagtcagcaggatgtgtgtgttaggcatgggttagaatctatgagaatacccacctatctggttgataggtgggtatttcactgaaagtgtatggtaaattatgcctctatcaacagctgacggtggaggaacaagaggcaagggggagaaaaacataggccaagccaatattgacaattccaagctgtgcatctgtgcattgtgtgtgcgtgcatgtgtgtgtgtgtgtgtgtgtgtgtgtgtgtgtgtgtgtgtgcatgtgtcttgcaaaaaatgaaaggccagataggtaagttggcactgaggacatttgaaagttttgttttcctactttgtgtagtgcatagatatttaatggatccctataatgtactagtttctgaagtattgggaatgcaatgtgtacagtggagtccacaggagacaatgggaggagaaaacaagtatacaggcaattatgtgttttgcaagtaccataactgagaaaagtaaaagggactagaggaccatgttagatggacactcaaacaatctatgatgcaaagagaaaagccttcccagaagagatgcctaatctgagacccaaaggataagtgaaaagtcaaccagtggatgaagtgagtgagtaggttctgccacatcacaagggctttctaaacagaaggagcaaaatgtgccaatgtcaagaggatcaaggttgtacagcacatttagaaagcaacatgtagctcacttgggtgctagaggtttgaagacatgaaacttgtcttgtctgtattgggattacttttgagatcttggctaaggtagcagttggagatattctagaaaagaattagggaaacacttgaaaacagagatgaagaggccaaagagaatgcttagaaggagaaacagccctttattgccttcaacctgtttctaaaaataaaatctctcaattccctactaggaattataacacttaaagttgtgtctttggttataagccaattctggctaacttaaccaaaagataatttattccaagaataatggtggcctaaagaaaaaaataaaaatgacaaaaaattagccttagaagtgagcaggaaagaagtccattctgtatttaactgggactcagtttctattttaattcaacaaaaacattgctaagcacctgctatgtgtcaggcagcatacaaaagtgggaaatgaggaaatataattgaataaaacagtaacatgtctactatgactgaccttggaatctagtaaggttgggggtggaggatgggtacatgaaacattcctagaaaataattatgtaactatgaaataggataagtgctatgagtgagaaacaacataattttaaattagggtgtgagaaaagacttagctgaggaggcgatttttaaactcagatgtaaagaataagtagttgtctaggtgagaagcatgtgtgaattgctgacatgtgaaagaagtcagtgcactggaacatcctagagagacaaagcagagtgagccagtgggtggagtgctgaataaacaaaagctttagaggtaatgctgaagcaaggtcatgcaggtttagtagatcatgccaaggtttggtatcatatcctaagtgaaatgtgggggattgcaagctgaactatagaatcaggcttgcattttaaagattgatctggatactaattaaaggatagagagtaggaggcaagaatggagatgaaaagggcagaacagtggttctcacagtaatctggacacatgaaactgtcacgttaaccttttctgtgcccactacacttttacattcctcttcttctagttgcttcggggaatttctcctcctgccacatgtcctagaggaggttattagtcttggagctgaaagggggttgctcagagtgcccccatccctctagtcaaagtgcttggttcacaaatggacaatggcccaagtagaatcaatcagtatattctgtgggattcacatacatatgacagaaaagagaaattcttttttactgcagtggcaaagctagtgataggtactcatggtgctactggcagccacttttcagaatacagtgaactaagggagggctatccctgttcaaggctgggcaaggcacttaagataggatcagtattactgacttctccattttacctcagcctgaatatggtgcacatggcactggtattgatcctttatttaaaattttgaccttttgtttattatgaccgtttttcatgcatttaattttttaatatgacattaaagcagtctttatattgattttgtttggtgcttccgtaaatcttgcacactggatgagggcttactcctctcaccctcgtgaacatttatcattttggatctgtctagcacttgaaccctatttttgtgttcaggaaatactttatgcatcttgatggaaagtggttttcattattaatctaaaaatatctattatatttatgatggatactgcaggtttatttgcttcacttccattttagtgggcttacatattgtcctcctctattttagaagctaggaaactaaaaaaatatattcctcatactttcttataactactggacaggtatataacctagattctacgagtcttataacttcacataagtctcggttgcagatgaggtgaaggctaggtgtgtagcgatcagatatttttgtaagcctgatggcagaggtagacatatgtaaacttttgtgaggcaactgaaatagagcatctggtttccagccctgagccagagaagtgctaagtagcaatctgtaacagtatctcataatgcaaaagtgcattggttttattttatggctatataacattcacagttggttgtttttgccttgccaaacattctgagagttgggtattattatttttccttccttctctctttctctccttttttctttctttgtttctctttctttctctctttctctctctttctttcttctttccttttctttcttttcttttttccttccttccttccttccttccttcttttctttttctttctttttttttttttgcttaaacaagctaaaaggactctgtggtatgtcacaaagatttctgtccctatgatagctttttcagcctcccttgcagcaaaagcaccttcacacaatttagattcaacaatcagatgcgtctgctttgggtattaaatcagaaattaatgacaaaagaacaaaagaggccctgagatatctttgttttgatggaaatggcaatagaaacaatatccaatttgaaaccagcagggacaaataccacaggcagcaactaaatactttgatttcagcccagtcagacattgagcagagggcttagctaacctgggtctagactcctgacatatggacactgtgagataatcatttggtgctgttttaagtccctaaattagtgataacttgttatacaacaacagaaaactaaacaatgtattggtatttacttaggcatgttttcccttatttcttaacagtacatcaactgatgatatttctcagaattgataatatcacaggttaaaaaacatactgttcataatgatttaaatatttcttgttttgttcagaagtacagctttcaattgcatgattaaataaatcaaatagatgggtttattatgttggagtgggatgaaaggaagaatcaaaagtgttgagagtatttggaaggttttatttatgataagggcccacattatataagctgaagatgaaaataatgggaaaaatggataacacactacaagaagtggtactgccaattcctatctaggagactttagataacttatttacattttaagtcttttctcatttgtaaaatggagctaattgtactacttcacagggctccagagataactataaacatggaatggaacaactggtagcagccactgcaaaaacatgccaaattgtaaagaccatcaaggctaggaagaaactgcatcaactaatgagcaaaataatcagctaacatcataatgacaggaacaaattcacacataacaatattaactttaaatgtaaatgggctaaatgttccaattaaaagacacagactggcaaattggataaagagtcaagacccattggtgtgctgtattcaggaaacccatctcacgtgcagagacacacacaggctcaaaataaagggatggaggaagatttaccaagcaaatggaaaacaaaaaaaggcaggggttgcaaacctagtctctgataaaacagactttaaaccaacaaagaaggcctcaaaagagacaaagaaggccattacataatggtcaagggatcaattcaacaagaagagctaactatcctaaatatatatgcacccaatacaggagcacccagattcataaagcaagtcctgagtgacctacaaagagacttagactcccacacaattataatgggagactttaacaccccactgtcaacattagacagatcaacgagacagaaagttaacagggatacccaggaattgaacccagctctgcaccaagtggacctaatagacatctacagaactctccaccccaaatcaacagagtatacattcttttcagcaccacaccacacctattccaaaattgaccacatagttggaagtaaaactctcctcagcaaatgtaaaagaacagaaattataacaaactgtctctcagaccacagtgcaatcaaactagaactcaggattaagaaactcactcaaaaccactcaactacatggaaactgaacaacctgctcctgaatgactactggataaataatgaaatgaaggcagaaataaagatgttctttgaaaccaacgagaacaaagacacaacataccagaatctctgggacacattcaaagcagtgtgcagagggaaatttatagcactaaatgcccacaagagaaagcaggaaagatctaaaattgacaccctaacatcacaattaaaagaactagaaaagcaagagcaaacacattcaaaagctagcagaaggcaataaataactaagaccagatcagagctgaaggaaatagagacacaaaaaaacccttcaaaaaattaatgaatccaggagctggtattttgaaaagatcaacaaaattgatagaccggtagtaagactaataaagaaaaaaagagataagaatcaaatagacataataaaaaatgataaaggggatatcaccatcaccaacaatcccacagaaatacaaactaccatcagagaatactataaacacctctatgcaaataaactagaaaatctagaagaaatggataaattcctcgacacatacatcctcccaagactaaaccaggaagaagttgaatctgtgaatagaccaataacaggctctgaaattgaggcaataatcaatagcttaccaaccaaaaaaagtccaggaccagatggattcacagctgaattctaccagaggtacaaagaggagttggtaccattccttctgaaactattccaatcaatagaaaaagacggaatcctccctaactcattttatgaggccagcatcatcctgataccaaagcctggcagagacacaaccaaaaaaagagaattttagaccaatatccctgatgaacatcgatgcaaaaatcctcaataaaatactggcaaaccgaatccagcagcacatcaaaaagcttatccaccatgatcaagtgggtttcatccctgggatgcaaggctggttcaacatacgcaaatcaataaatgtaatccagcatataaacagaaccaaagacaaaaaccacatgattatctcaatagatgcagaaaaggcctttgacaaaattcaacaacacttcatgctaaaaactctcaataaatgaggtactgatgggacgtatctcaaaataataagagctatctatgacaaacccacagccaatatcatactgaatgggcaaaaactggaagcattccctttgaaaactggcacaagaaagggatgccctctctcaccactcctattcaacacaacatagtgttggaagttctggccagggcaatcaggcaggagaaggaaataaagggcattcaattaggaaaagaggaagtcaaattgtccctgtttgcagatgacatgattgtatatctagaaaaccccattgtctcagcccaaaatctcctcgagctgataagcaacttcagcaaagtctcaggatagaaaatcaatgtacaaaaatcacaagcattcttatacaccaataacagacaaacagagagccaaatcatgagtgaactcccattctcaattgcttcaaagagaataaaatatctaggaattccacttacaagggatgtgaaggacctcttcaagaagaactacaaaccactgctcaaggaaataaaagaggatacaaacaaatggaagaacattccatgctcatgtgtaggaagaatcaatatcatgaaaatggccatactgcccaaggtaatttatagattcaatgccatccccatcaagctaccaatgactttcttcacagaattggaaaaaactactttaaagttcatatggaaccaaaaaagagccctcatcgccaagtcaatcctaagccaaaagaacaaagctggaggcatcacactacctgacttcaaattatactacaaggctacagtaaccaaaacagtgtggtactggtaccaaaacagagatatagaccaatggaacagaacagagacctcagagataatgccgcatatctacaactatctgatctttgacaaacctgacaaaaacaagaaatggggaaaggattccctatttaataaatggtgctgggaaaacaagctagccatatgtagaaagctgaaactggatcccttccttacaccttatacaaaaattaattcaggatggattaaagacttaaatgttagacctaaaaccataaaaaccctagaagaaaacctaggcaataccattcaggacataggcatgggcaaggacttcatgtctaaaacaccaaaagcaatggcaacaaaagccaaaattgacaaatgggatctaattaaactaaagagcttctgcacagcaaaacaaactcccatcagagtgaagaggcaacctaaagaatgggagaaaatttttgcaacctactcatctgacaaagggctaatatccagaatctacaatgaactcaaacaaatttacaagaaaaacaaacaaccccatcaaaaagtgggcaaaggatatgaacagacacttctcaaaagaagacatttatgcagccaaaaaacacatgaaaaaatgctcatcatcactggccatcagagaaatgcaaatcaaaaccacaatgagataccatctcacaccagttagaatggtgatcatttaaaagtcaggaaacaacagatgctggagaggatgcggagaaataggaacacttttacactgttggtgggaatgtaaactagttcaaccattgtggaagtcagtgtggcgattcctcagggatctagaactagaaataccatttgacccagccatgccattactgggtatatacccaaaggattataaatcatgctgctataaagacacatgcacacgtatgtttatagcagcactattcacaatagcaaagacttggaaccaacctaaatgtccaacaacgatagactagattaagaaaatgtggcacatatacaccatggaatactatgcagccataaaaaatgatgagttcatgtcctgtgcagggacatggatgaaactggaaaccatcattctcagcaaactatcgcaaggacaaaaaacaaaacaccgcatgttgtcactcatgggtgaacaatgagaacacatggacacaggaaggggaacatcacacaccggggactgttgtggggtggggggaggggggaggcgggagggatagcattaggaaatatacctaatgctaaatgacgagttaatgggtgcagcacaccaacatggcacatgtatacatatgtaacaaacctgcacgttgtgtacttgtaccctaaaacttaaagtataataataataaaatttttaaaaaatagagtgtttataccttgtattccaatgtccagcatatggtaactatattctgccatcaaacactatttaagagaatctctaaattctttccttagaagtgatttcagtgaaaataaagtttcttaagttgccactccattgaccactccatcgtgtcttgaacctttctaggctcatggttcaaagtgaaaataatttcttagttttataggacagaataaagttttaactaaatccataagataataaaaaatgtaactatagttattcatgtccaagaaaaatatactagtccttttgtctctctcgctcatgcacaccccagccacacacacacacaatcacacacacacacactcaatcacacacacacacacatacacacacaacctggcttattccagcatgtttgccaccatacatagtttttaaaatatatattttaaaaatagattttaaaatgctgaaatacaacacttgggcaattgaacaaacctttatgaaattaagttacattctctacatgttcaagctgtctgtactggcatttcaaaacaacaggcttgaaatctttctttcttgaagtcctagaggtcattcttcttcagtatgttactcatctagtatttcagtctcataacaacaaataagcatcgtagggaaatcttagtaaatcttagctcatggaatgtttttgtattgacaaagttaaccaactggaacaactacttagggatgtttctttgaatataactggctgaaaactcaaagccactacaagttagagatccatctaaaataaatatattatagctaaactgtaaaagttactataaacatcatttttctacagacattcacattccatatacatatatgtacatatttatacacacacacacacacacacactcgtttgtatagctctttgtagattacaagaggccccacaaatattatcttatttacttctattggtttactacaaaaccagggaagttctgactaccaacaacaatgtgatttttttagaatctctgaattcagctcatttactttataataatctaacttgtaagaacatcgaaatctttatattgaaggtgagcaacattcaactacttctcactgaacacttgtaaaacaggaagcaaaaccttctataagaagattgatattaacagtatttaataatctctatggtctgcatactcaacagttagagtaggctctatcaaaaaataatttatgctgcacatcatccctgatctataatagttttggattttcaattttttatgaattttctactgatacaattataatatacttctgtaagacatcagctttttataagttctgtatgtacatttaatcttacatcaattttatttttgtcaattattttacagacatgagaactgagaatcagtaaacaatatacccagcatcatacatacagttgatagagaggtacagattcaaacttgagacttctgattgtaagtttaggcctatatcccttgtaatatacttgtcatctatgattacagctatatatatatatatgttttcttaatgtttagcccaaatgccaaaaaccaaaaacctaatttcattaactgaaaatctgctaagtttctctaattatttcagtattttagatgtctttatgaaaatatgttccaacttgacaattatgctgcttagattttgattaaacaagacttttcatatgagaagcatgcaccagaataagtaaaaacagaaatatgtatgctgttatctgttccaactttggtcccaacgctcattctgattccaaggaaatacattactctacatatataaggcaaatgtcctaatgaatctacctccaactaaatgaaaagatactgaatcctcccatgggaaaactaacatgcttcaagaattctgtgcttcatttgactctgtagaaaaagggcccagagtggcgagaagaaaccattctgatgagaagaaaccattctaagcatcaaacatagaaccacggtggacctgtacttccctaattaaaagactgacatctaaagcatctgggttttagaaaatatgtcttttttatattcatccgtggtacagtctacttatcagaactttcctcctcctctggcaaacaaacaaacaaaacgcctccttcatctcaataaaacatttctacatgctggccttagtcaaattacaaaatataagcctttttttaatcttttagcttatctaaataaaaagaccaatgactgagttaattatttctatatattatttactttaaaacccattggaaaatatcctgttcctcaaaaggtgatctcacttacagtcttctaatactttaatgccctgtgaaactatccctcacaactggatcatgctcagcctagacctaagcacagaattcatattattttccagagatatttaatgaacactgtgtgtcaaatgttgtgctagatacagggacacaatatgtacacatgacttccataacccggtgctttggggtctaattatgaatgaaaaccaacacaaaaatgaattacaccatgccccgtgttatgagatacaatgttggcacaaagtaaatcataatcaacactgcttgggcatgtctacaaactgtcagtctgaaaagattttgcagaagaggagcaaaactgagttgaagacttcaaggagaaacacacatccataatgaaacaagaaaaaaatagaatcctaagctgaggaaattttatgtgatgaggtgtgaaaggggaaaaagaaaatactgaggtgctttaaatacttacattttctcagaatatcacatagaggggagagaacagtgcgagataaaatttgaaaggtaaataggagccacatcctggaggaccctagatgccactaatagggggtttagatcatttctcaagttcattgaagggtattattaaaaggctatataagcctgtaatcctaacactttgagaggctgaagcaggctgactgcttgagctaaagacttggagaccagcctgggcaacatggtgaaaacacgtctctatcaaaaatacaaaaaataaaaaaaaaattagcaaaattagccagacgtggtggtgcgtgtatgtggtttcagtactcaggagtctgaggtgggaggctcacttaagcccgggggcagagggtgcagtgagcagagattgtgccactgcactccatcctgggtgacagagcaagacactgtcaaaaaaaaaaaaaaaggctacataaaatcaggtcaccactttataaataccactcagaaatagcagtggaaagacagaagggaaaactagagacaagaaattgtggtagcctgaatatcctgtttcaaatacttagttcacatgtatggcacagccgttctcttatatgttcctgaaatcttggttgttaagccaaaccaaggatgggggtactcttcaagagcctaagtggctgcagaggtacatttaatcttacaccaatttcatttctatcaacgattttacagacgtgagaactgataatcagcagatagacgacatacccagcatcacacctacagttgatagagacgtatagattcaaacttgagatttctgattataagttttggcctatttctcttgttatatatttgctatgtatgattatagcaatacatgaaaatatattttcttaatgtttggcccaaatgccaaaaaacaaaagcctaatttcattaactaaaaaatctgcaatccacttctgtttgactggaatttacctctatttgacctgaatgactttctttttttaaaaactgttatttaattaaaagtaataaatctcctcatgctgaagaacactttcataaagaggggaaagtaacctacattatgtacagaagggttatataatgaggcatctcaagaatttaggaagctagttcatagagtgttgcagtattcttgtaagagataaccagaatatgaaccaaaggagggatatagagaagaaaatggcaaaagaaatatttgagaaaactgggtgattgatcagatatggaggctataaaaaaaggagagatcagtgatgactcacgtacttgggtggtggagaatacagtagagatttatttttcttttgcaaaggttagaaatacaggttatattccagaaaccttcaagctcgcatgatattttaaaccaaatcaacaaacattttatttaatattataactctaaaacagatatttagtgtcacaaaaatatagtttgcattagaaattagaaagctagcaattttaaaacacaattgaattatgcaataaaatgactataagtaacacttggtttagctgcattacagtcagagtaatgatttcagtcatcgacattttataatacagaatactacaagaatagttataattaggcaattagttctatcactcacggcatagagttggaagcacaaagcctcaaaatgggtaatcaatacttctacatgtaattaatcagttgaatttgcactataggtaaacacagggctaaaataaatgaggtcaactatagctagctcaatgtgattagccatcactgtagagatgtataaaaacattggcaaaaacgtatccattgcttccaggataaactaatcttacttttaagacacttacttgtgtattcattcaatctacagttactgagcactgattaagagccagacactatggtagtgagtgctggggatacaatgataaatactataagctggagacctggcctctgtggtttagagtttagaagagaagataattgtgcaataaccacaaaatcctatagttacaaactgtgataaaacttctgaaaaaagatgttgttgacagaaaaatgtttcttcctcctgaagatgcctacatcctaatccccagaaactacaaacatgttaccttatatggcaaaggagatttatcagatgtaataagaatcttgaagtaggattatccatatggctccaaaataatcacaagtgttcttataagaggcaggtaaaggggtaagagtcagagagggagctgcgatgatggaagcagatggtaggaatgagaaagaaatttgaagatgtatgctcttggcattgaggatggaggaaaggctcatgagctaacaaaggccagcaatgtaaaaatcaagaaaaggcaaggaaacagatctttccgaagagccttaataaggagcacagccctactaacaccttaatttcagtccagtgaggcccttttcagacttctgacctccaaaacagtaatctcataaatatgagttgtattaagcaaccaaatttgtagtaaaagttaatggtaacatataggaaattggtacacaagatttgagaaacaatgtagagaatatgcaaaaagagtatctcttctagaatccctcattttaaacatgatttggaaattctagtatgattgtgctaatctcctttaaatgtcttcattccacattgtaaacatatttgaagatatcacagtgtaccccataaatatttacaatttttattttttaattaaaaataaaaccttaaaaatgtttcaatcattttcttttgccattaggatgaagaacaaaatccataacatgatggacaaggccccactgacgcatcgtgtgtctgtttcttcagtctcatagaatgcagcatttccctttgatctcaccattccagcctgctgctcttctttcagtgctttgaaacaagagagatattcactcctcccaccacaaggcctttacgcaagaggtttgcatatttctcctgcaacccttgccctttgtccagtttattcaaacttatcctttagatctgtgttcaattgttacttttccagttccaggaatgctaagtaactaaatattggaggaaatttaagcttatttttatattgagggagaacaccaattatatagaaagaggtagccaacacaagaaagaataatcaatactgtgagtttcctgaaaagataaaaagccatgatatccaggggaaaaaagagaaaaaataagaaagaaaggattcgttttagattgaaggagatgacacttctttatttttttcctctcttctttgcttttcattcccatcttcatcaccataaatttgaaatgcctcaagtgttaattctaggactttttaatgttgccactttgctttgttttctctttaatttattttattcttggtagcctggtgtgaaagttactataaagggaactgggaagaactggtcaccaaactgcatgctaagggcttggctttcagtgaccacagtgaaaaaagtaaatgaagttttgggtccctgagagaaagagatgttgaaatttaaatgaatgccttaatttagcccacacaagcataaatctggctaaggcaagatgacaaaaatttccatgagaaataaattgtatttgtcataagagagaaaatctgcaggcatgaaacaaacaaaacaaaaataaaaggaaattgagacagaacaaaggattagagtctcaagtgcatgaggaatagaattcacaaagaaaccatacttctgtgtgtatacattgattaaatgattaaggaaagaatgagaacataaatataaatgggctgaattgaaggacagaacaaatacaaattctagaaattatgtattctttatgaattgacttttttctcattgtaaaatattactctttatctctgataatatgccttgtcatgaagtctactttgtatatagcttccatatgctcagtatctatatgaaatatcttttcccatcattaactttcaaatttctgtatctatatttaaaatgcctttcttctataaacatcataactaggtcttgcatttttgtcaagactgacagtatctgatttttaattagggtgcttaacctgtttacatttactgcaaatattgatgtgtttaagcctactatcttgctatttgttttctacacattccatcaatttttagttaccttactcctcattttctgccttctattaggtaatctgcatttaaaaaaatgctttggggattaagataaatattttaaacttattcattcatgacagggctccctgagctaaatcaattagttcataatacaaagagttctgcatgcataaattgggatggaaaaggcagaggtggaaaaacactgagggtcagtgatggcatctcaaattgtatagaaaaccagaagggtttagaaaagctttagatgttgaacaaggttttttgataaatattttcataatctttctaatgaaaatagattacattaactctaatgagatggtttggctgtgtccccaccaaaacttcatcttgaattgtggctcccttaatccccacatgtcatgggagaagtgggagataattgaatcatgggggcaggtttttttttcccatactgttcctgtaatagtgaataagtctcatgatatctgatggttttataaagggcagttcctctgtacatgctctctttcctgctgccatgtaagacatgcctttactcctccttcacctcctgccatgattgtaaggccttgccagctatgtggaactgtgagtcttttaaacccaattttctttatcaattactcgtcttgggtatgtctttattagcagtgtgagaacagactaatacatctaataaaatcctgcaaggaagaaaaatctgtccattgaaacctttaagtataggctctttaacaactgtacataacactcaggagtaaatcctgaagcaaatgggaacatgcttacttctcactttttcactttgtgtaaacagccttaaccagaaataggggatttaataagcaagcaaaacccaaatgaaaaatagcccctttgttagatattcttctcagtgagtgaatatgctgacagaaacttagatcaaaaatagaataagatctagaataaactgaagcccttacaaataaaaacaactgaatacttcatcccagtcaaaatatcataggagagagtttctccttaaagatgccaatgcatagcataaacagaaaatataattggccaatgatggttaatgggtgcaaaaaatagttaaaagaataaataagacttactatttgatagcacaacagggtgattatagtcaataataacttaattgtacattttataatattgagtgtaattggattgtgtgtatctcaaaggataaatgcttgaggggatggataccccattctccttgatgtgcttattttatattgcatgcctgtatcaaaacatcttatgtaatgcatctaccatatacccgtacacacaaaaaagaattgctaaaaaaatctggtaatcagtaaggatgatccaggggaaattcaatactcaattttcaatattctgttttatttttacacttacaagaagaaatttatctaaataataaaggacaaccttgtgtgcatatatttatcatatatatatatacataattttattcttcacttttaatttttgtgggttcggagtaggtatatatttatggggtacataagatactttgatataggtacacaatgtatgataatcacatcagggtaaatggaatatcaatcacctcaagcatttatcagttatgttacaaatgatccaattacactcttatttatttatttatttatttatttatttatttattttgagatggaatctcactctgtcacccaggctggagtgcaatggcatgatctcagctcactgcaacctgcgcctcccaggttccagcaattctcctgcctcagcttcctgagtagctgggattacaggggtgtgccaccacgcctggctaatttttgtatttttagtggagatggggtttcaccatgttggctatgatggtcttgaactctggacctcatgatacgcccagctcggcttcccaaagtgctggcattacaggcgtgagccactgcacctgaccttttttagttatttttaaatgcatagttaaattatcattcactacagttagcctgttgtgctgtcaaatactagttcttactcattctaacaattttttgaatgtattaagcattcccacttccccctcaacccactactacccttgcccctggtaaccatccttttactctctatctccatatgttcaagtgttttaatttttagatctgacaaagaagtgagaacatgccatgtttatctttgtccgcctggtttatttcagttaacttaatgatctccagttcaatctatgttgctgcaaatgacaggatctcgtttttttttatggctgaatagtacaccattgagtttatgtaccatattttctttatccattcatctgttgatggacacttaagttgcttccaaatcttggctgttgtgaacagtactgcaacaaacatgagagtgcagatatatcttcaatatcctgatttcctttctttttgatatatacctggcagtggaattgctggatcatatggtaatgctaattttagtttttggaggaaccaccaaagtgttctccacaatggttgtactaatttacattaccaccaacagggtagaagttttccctttttcacacgtttttgccagcatttgttattgcctgccttttagataaaagccactttaactggagtgcgatgccatctcattgtagttttgattggcatttctctgatgataagtgatgtcgagtaccttttcatatatctatttgccatttgcattaatagatcttcttttgagaaatgtctattctgatcttttgcccatttttaattggagtattagattttttaattttactatagaattgtttgagccccttgtacattctggttattaatctcttttcagatgggtagtttgcaaatatgttctcccattctttgggttgtctcttccccttgttgattgttttctttgctatgaagaagctttttaacttgatgtgatactacttgtctatttttgctttgattatctgtacttgtgaagtattactcaagaaatctttgcacactgcaatgtcctagagagtttctccaattttttcttttagtagtttaatagttcgaggttttaggttgcttctatacccagttttttgaaagtttttattcatgaagggatgctgaattttattaaatgctctttcagcattaattaaaatgatcatatggtttttgccctccattctgttgatataatgtatcacattgattgatttgcaaatgttgaaccatccttacatctttggaataaatcccacttggtcatgatgaattatctttttaatgtttttaatgtgttgttgaattcagtttgctagtctttcattgaggatttgtgcatcaatattcatcagggatatcaacctgaagttttcttttgtttggtaggtctttgtctggttttgttatcaggacaatactggccttgtagagtgagtttggaagtattccttcctcctctatttttcgggatagtttgaggagaattagtactagttcttcaaatgtttggtagaatttagcagggaagcccttggattccagacttttctttgctgggcaactttttattacagctttgttatcactacttgttatcggtgtgttctggttttggatttcttcatggttcaatcttgatagattgtatatttctaggaatttatccatttcttctagattttccaatttattggcatatagttatttatagtagccaataatgatcctttgtatttccgcagtatcagtagtaatgtctcctttttcatcgctgactttatttatctatgccttttctcttttattcttaattagtctggttaatggtttgtcaattttgttaatctctttccaaaaaatagaacaacttttcctattattgatcttttgtattctttgtttcaatttcatttatttctgccctgatttttattatttcttttcttctacttattttgggtttgatttgttcttgcttttctggttctttaagatgcatcatcaggttattggtttgaagttttttgtttgtttgtttgttttgtttttatgtgggcacttgtagctataaactttcctctttgtattgccttcactgtatcccacaggtttgggtatactgtgcttcaattatcatttgtttcaaataattttaaagttttatttttattgtcttcattagccactggtcattctggagcatactgtttaattttcatgtttgtatagtttccaaaattcctcttgctgttgatttctagttttgctctattgtggtcagagaagatgcttgatattatttcacattttttgaatgttttaagacttgttttctgacctaacatatggtgtatccttgagaatgattcatgtgctgaggaaagaatgtgtattctgcagctagctgttggatgaaatgttctgtaaagacttgttagttccattatatctatagtgcagattacgtccaatgtttctttcttgattttcagtctagatgatatttccaatgctaagagtaagatattgaagtctccagctattattttattggagtctaacttttctttagttttaatactatttgctttatatatctggttgcttcagtttggggttcatatatatttacaattgctatattctcctgctgaactgacacctttgtcattatataatagtactctttgtctccctttttatagttttggtcttgaaatctattttgtctacttcatcaattctgctattaagacacagggaggggaacgtcacacaccggggcctgtcagggtgtggggggctgggggagggataatattaggagaaatacctaatgtaaatgatgagttgatgggtgcgcaacatggcacatgtatacctatgtaacaaatctgcacgttgtgcacatgcaccccagaatttaaagtataataaaaaaaagaaacttctatgtattcttcagtatgtcgattgcatttttcaaccacagaatttctgattgattctttttaattattttaatctcctcgttggatttagctgatacaattctgaaatgcttctctgtgttattttgaattattttgagtttcatcgaaacaactattttgaattccctgtctgaaagatcatatatttctttttctccaagattggtctctggtgccttatttggttcatttggtgaggtcatgttttcttggatgttactgaggcttgtggatgtttgctggtgtctgagcattgaatagttaaatatttattgtagcctttgcagtctgggcttgtttctacccatattccttgggaaaggtttccgggtattagaagggacttgggcattgtgatataagccatatctgcattagggggctacccaaacccagtaaccctacagttcttgcagactagtagatgtaccacttcggtggtcttggacaaaatacaaataaattatctgtattaacaggcagacaatcttgttctcttccctcacctactcccagtcaaacagagtttgtctctctctgtgctgagccacctggagctgggggagggagaacacaagcaaccctgtggccacttccactcggacattgctgggtcagacttgaagccagcacagaactggatattgctcaagtcctgctatactcactccctggctactgcctatattttctcaaggccctagggctctgcaatcagcaggtggggaagccagacggacttgtatccttcccttcaaggtagctagttcctccaggccccaggtgagtccagagatgtcatctgggagccagggactagagtcaaaactttagaaatctacttggtgttctattctattatagctaagctgtcactcaaaacatgagacaagttccttcccactctcttctctcttttccacaggcagcaagcctctctccatggccaccaccacagacccaccatggttactgctcggctacctctaatgtacacctaatgtccaagggctcatcaggcagtttatggtgactgctgctagaactgggacacacccttcagggcagtaggctccccgctggtccaaagccagtccgggaatactatccaagagccacagcctggaactaggaaccccaagagtccacttggtgctctaccctactgtggctgaactggtgcctgaagtcatcacacctcagagtctcactgaaggcccacggtttaccatctgggtattcctgcttggttcttgaggcccaagggctctttagtgagcaggtgataaattctgccaggactgactcctcctcttcaaggcaggagctcaaggacatgttgtccaagagctagggcctcacagctctgccctgtgccctatcctactgtggctgagatgatatacaagatgcaagacaaagtcttcttttggaagaaagatttccctttcctcaagtagaagaaaggagacactttcattactccaagttgtgcttcctggtgttgagggaggggtggtgcaagttcttgcttagccaccccagctggtgttctatgtccactggctctaagcccagcacagcagtaggagtgttaggaattggagtccttgtggcctagactgccttttaagtttatttaaggctccagagcactttagctcacggtggtgaggcttgctgacacgtaatttctgacctttgggatgatcactggctagggcttttccaaatgctcccttttggtgggtggtggtaagttgagttcagtccagttttgcttcccactgtgatagggcagtactgagttcaatgctgggtctcaaaatgttgcattctctctcctgcatgtgcacagattccctgtgccatgcagaaactgccagggggtcggggaggggcagtgtcagcaattcaagactgtctttcttaccctctttagtgcctttcagtgatgcaaagttaaaaccaggtaatgtgattgcttacctaatttttggttcttatgaaggtgctttctgtgtgaacatacttgttgaactggtgttccttttgggggtacaatcagtgaaggcatctatttgggcatcttgctctaccccacgtatttttgatttacacaaatactggctgaaaaactttacattgctagtcaacttctgattcaaagtcaataaattaatcagatcatggacatctctaataatcctcagacactcacacacatatgtctaactgataatattcttaccctttttgtgataacacagctgctaactttatagagatgggtatactgtgcaaatcgaatggccagactcaatattttcccgatagtctcttcattgaagttcttcagggaccccccctatttataataaagtcatagctaactcggatattgacttactgatattcttatgtcaaaatccaaactaaattgaagatcttcacaaacaactggaatctctatgaactaaaatgtctactaataccaacagaattctagtgactaagcctatgaaggttcagatagacccatccagacctctaccaaagctttgacaacaccctctaaagctgcgacaaagaaaagactaaatcaataaaagacacgttatacctgtgccagccattctaatacttctatcctccaagtcaagaggaacccaacagacaagaatatatattattttgagaatactagttaacaaaatttcccccaacatatatatatatgtgtgtatatatatgtgtgtgtgtgtataactttatataagtataaataaaatagttattccccatggtatccacaacaaatcattttatatttagtgtcatgaggctatataatttacagttctggatttgggtcctgctttctttgttgtccctttagatcaaaaaacttcctacctctgcctttgcctgacaaggtcaacaatataaataggcatctatacttcagaatttagtaagtttccttcttttcacaagttatttaccagggttttaatgactttacaattcctttagattccattgtatttccatacctggatgacctttggccatgtactaaagaagacctgaatttaaagatcaagttctatccacataccattttagctcgaaaagaatataaatattttctaaaataaattgcaattttatcaataaatgtgtattaactaagacgtaatatatgacagaaggtaatacattgcttacttttgataggctaaaaaccatacaaaactttcagaagccagacactaggagaaaatttaaataatttctactctcattagctactgcaggcaatgaattcccaacctttctgaaattgccagacttctttatgacctaaatgttcaacaaccaaatttcttccttgggaatatacgcattggcacatattttactcagtgatatagagaactgtgaagaatgttattccataacatacaacaatgacaaaagatgtcagcaaacaataagtttattatttttcttaaactcagcagagagctgacgtagtagaacagtgaaatggcctaaaactggagaagagacaagtgcctgaaagaagtatgagctgtaagttgtggcttaattgttcaggacacaggaactggaaagatagttcagtaaggttgattggtgtatcagtggagtctgagtgcacattaacaagggagggtgacacctctagaggctgcaaacatagaggcattctacacactcttgtgggaatctttccattaacccaactgacttaaatcattagaaaagtctttttaatggtgcaggctttagggaagggaacagcaaccgctgcaggaagtcacaaaactctcctacattggctcttctaatctaaatctcctatgaaacaaaaaccttaatatgtgagaggagagggcatggcaacaaacatagccatgattagggtactggtgaagatctattgcagccaggagaagggaacagggggaaaaaagctttttaccctagcaaaggggcggggatatttactggtgtcagaaatataccaggatagaagtggtagtactgagaagggaacactcttgaaacctaggatatgatgccaaagacagaggcttaatcagaaccacagagaacactctgtactctcaaccacaaaactaacaaatatcaaataacaggttaactgcaagagatagcctttcttctgaggtacagtgtaaagggaagatctaaacctgaggacggagcagcaattggggaaaaattaaaaaccaaaatccctgacaaaccagccctatcctaaatcaaggtgttcctgaagattttaaatcctgtgttaaaaggaaggtaaccatagcaaaaactttaaacttctcccaactcccacttagactaacttaaatcccatactaaaggtgtgtctatctctaagtataaaatatatttacttcagtctctactgtcctacacaatatgtctccttgttttaaaaaaaaaagcaagaaaaaaagcatactatcaagaaacaaaaaaaaattaactccagacccatatatgacagatgttgaaatttctcatttaaaattattataattaaaatgttaaaggtataataaagaagtaaggaaacatactagattagatgaatgatttcagcagaaagattaaaactacttttaaaaaaatcacatgtaaacactagaaataaattgaaaaaaaaaaaaaccagtacagaattcttctgagaggctcatcagtagtctagatacagtcaagcaaagatttacgggacctgaagataggtcagtagaaattatctaacttaaacacaaagaggacaaaagagtgaaaaagcaaagaacacaaataaacaacaacaacaaaaacagcacagagcatccaagaatgtgaacatcatccaactctttcctatacacataattgcaatatatgaagaacggaacagaatacatttgaaaaaataagcttattttttttccaaacttaataacagacataaatccaagaggttcagaaaacactaagggggaaattaccacccatagatgcatcatattcaaactgcttaaataaagacagagacacttttgaaggaagtcacatgaaaaaatacacattaaatatgaccagagataaaaattacaatcggcttctcagaaaccatgcaaactgaaagacaaaggactagcactttgaatgaaccaaaataaaaatggcagcttagaattctatatctagtgaaaatatttttctaaaataaaagagaaataaagtatttctcagataaatgctgagggatacccactctccaagaaaaattaaagacagacctttaggtagaaggaatatgatttcagacagaaatttgtttctatataaagtaatgaagaacactcaaaatgcatagtattgccttcaaaaacttccccagtatcaatcaattccatcccttgaaaaacttgctataaatcacctggacccagatcgcaggtattctgtaccatgtttttcatttgcagcattttcatttgattattccttagagtttacatttctcttctgaaaacatctcccccgatgacctctttcagaggcacatttaaggctccactgaaaggtctttgacttgcacaataaataatatgtctccttatttttgcaggcttcacactatgaatacattccaaggagaatgtatgtcagttcaaacatcggcaaataatttggccattcccagtgaagtgaaagacatgcatactgttgaactaagaattccacttttaggttttactttacatgaattcactcacgcataagaaagcacatgcaatgatgtccatcactacactgtttatagggtgaaaatgtggaagcaatgcagtggaacctcaagttcagaaaacctacatacattttgttatgatgacaaaatggaattctgtcaagcagtgaatattaataatgcagatctgatatatgaataatcttataaatcttataaattattttgtatttaaaagttatatgcaatgcaatatacatatacaaatggagtcattatataaaattccttttttgtgtatagatcaaacaaggtcaaatatcatcagcttcatggtattccacctaatcaaatttaaaatacatttaaagaataatatatggtttgtggagacgtagctaaagaacagcttgctagctaactaaatttgttggccatataatatgtgtaaaacattgttataagcatttcatatatattaatttatttaattcacacaatcaataatcttatcaggtagaaaataatattatttgtcctcatttctattgatgaggccaataaagaagaaaactgcatgcctgggagaaagaacatccatcttattttagaggttatccctgggaagaaggaatatggggtcgtttgatgggtgggaggatcttacttatgtattattacaaataaacaaaggggaaaaaatccacaagagaatgggagacctgaaggtaatgtgataaaatggcataatccattttatatctcagcagtatattattcatatatattttgtatacttttctgaatgtttgaaatctctatttttttatttcaaaggagagatgacccaaactctttgtgactcactcccccataatttcctatcctctttctcctccagcagatatcagtctttaagtgatcttcaaagtccttcataacagcccttagtaataacaacagacacttatatgtccaaaaagtatctgtaagaagtacaaagaaaaaatacttaaaaaaaaaaagaaaaagaaaacttcctccccccgaaaaaatatatatgtatgtattcctactctgcaggtactttgagagtggctcaagaaatatttcagtgttccaaaaatcatagaagtatttagcttcctgcctatgaaagataatttctctttgaaattattcagctgggaagcagtagaaggtaacagaaagctcagtgaaagcaaactaaatatagggaagtaatcaattcactcaaataatgaaactattgtagcacaggggcacttccaaattagaaaaaaacatcatagtaggagatgctccttgttaattttttaaagtgtcaatctgtttaagggttaaaggacaaaaaatatatatggttgatgttcctcctagtaaatttgtttttaagtgtgagtcatctgaaaggtcataggacaaaatattttattaaccgttattttaataattgtggttggaattttaaatatattgaggacaagagttagagacctgggtttctctagaagtgcaatgttccttaggacaatttcccttcaatgagtttttaaaacagaaaccgctgaggggagtgctctttcctgggagcaaacccagcttcaccatgctctatccctaaagcaaatgaaagtgtatgatgccttgaagatggtaggtttaatcctaactccagccttggccagcttcactttctcccttctgactcttttcccgggtaagataaattaagacctataactgattctctgatttgggaagtttcagaaaagatggattcaaccattgggagaatgatgtttgctcttgcttgtcatttttatctttatgcgaccttgtttttatgctccatctgcttgtctcactggaggcctttaccttagcattagagatagaaatagtctagatttttaagactgttgctgattctttctggtggaattggtttaaaagatggatgcctaggacaaaggctgatctgtgtttgaaggtaaagccaaacaaactcattcatgctcagtcggaatgtgaattttctgtaattaacattatactttcactaatgaaacaaacctttaatatcaagccctgagcccagtctttaatacttatgataacttcataaatatatacgatagattcttccctcaatatctccgagaaaataatctatatctaaaaggtttttaaactttaatctgagagaaggatttagtgtcagttatagtctctttccttttcttattttactaatagtagaacagataccttgggtcttcaatcagactatgcgtctttttattatatagtccagtttttccaaatgtataaattagtgcccacagtaagaaacatatttcatattttatattatatttacttaaatatatgtgtgaatgcatatgtatgtatatattacatatacagatatgtatctatatgaaacaacagctccaagaagcaatacttaccttagtacatctaatgtactctaatatttctattctaatcctttctttttcaaattaaaaatggactggggctgggtacagtgactgacacctataatctcagcactttgggaggccgaggtgggaggattacctgaggctggaagtttgagaacagcctggccagtatagccagatcccatctctacatttttttttttaattagctggccatggtgttgcccacctgtagcgctagctactcaagaggatggcttgagcccagaagtttgaggctgcagtgaggctgtacttcatactccactgcagttcagcttgggcaacaaagtgaaatcctgtatctaaaaaacaaaacaaaataaaagcaagccgttgttgttttattatttttatgttctaccaccaggttataggctgtagcttgcaaaacactgattagacaacatggatataagtgtatctggttaaagcaaattatctatctgtctatatgtatacatatacataaagtcagataagcaatagtacatatatagtattatatattatactgtgttctgtgtataataccatatgtagtattacttatctgattgcccttctcttttctaaaattttaactaaaatagtgaaataaggtacattcagcttctttaagtcagaactttttgcaaacatccaaaggattagataaaatggctgagctcacagttaagatgaaaataaggtacgagtcaggcacagtggctcatccctgtaatcccagcactttgggaggataagtggggcagatcacctgaggtcaggagttcaagatcagcctggccaacatggtgaaaccctgtctctaccaaaaaatacaaaaattagctgggcatggtagtgcctgtagtctcagctactagggaggctgaggcaggagaatcgtttgagcttgggaggcggaggttgcagtgagccgagatcgtgccactgcactccagcctgggtgacagagtgagaccttgtctccaaaaagaaaaaagaaaagaaaagaaggtacaatttattacaaaattgacatgcatataaattcatacagctacctatatgcaaaatacctcttaatttgttttcagtgattaaaaactcttagtcaggcgtgattaaaaaatagtatttccacattgaatactctcaatcagtgatagtttctatttaatcttctttctgtttgataattttgtgccccagctttatgaataactgaacaagatgccaccagctgagatgaggcgcttagatttttttcatggaattactctgtttatccctaaataataatgaaaatttttgttaaattcttaagttagcttcaggttttaatggtgtttatgataaatttagacaataaacagacaactgtcttactcttgcctgttttacatgtcttcacatattttcccccattgtaattttggctaaagcagaagtggaagaattttggcttgtggtttcacctgttaccagaaaatactgctgtcatcagtgagaaatacacaggaagatctgaggagagtttcacacttggaaagaggaatgctggaaagtctacatacctgtaactgcatccatggatcatattcttgcaatacataactttttatataatgtgataaatgcttgtttttcaacttgatttaataattgttacttttgtttatgaaaaaaatccacaaataagcaaattaaacttaaatggtttgaaagcacaggtagaattctaagatagaattctaagataaaattctaagaccagaatctcattctgtagcagcctatagaagttcagagaggatacctaggcttttgactgagcctccaatggctctttatgagccattggaggagtgcattttagaaagattactctgattgcagttgtcatatacaaggtcaaaaacaagagtagaaacaatcttcctcactttttagctccacacccaataacttctaaagcagcatgagtgtaggataattgggtacaacacagggctctgtagcaacacagaaataattatcaagtgttcagctgtgaacagagctggttaagaagcagttttattccaagctggccagttggcacatggttgagttatgcagagtaaaagactctggtttggagatgtgggtgctaaatcttagaaaatcactcagatttgagaataagcaagcttcttcacattactctgctttttctaattactttctatgaaatatgaatattaaatattattcatataaatatttaaatgaaatagaataacttagtggaaattgaaaaaaataattactaggtataactagtttccatgctcacatatcaagatggtaataagctacacatgcatttgaatgtggggctatttgtttaaaattttaatctcactttctctctctgctccatttagagatattttttaaccctgattttattgaaataggcagtgggttgtatataaatttctctgaaaatatctagacaaatcaactgacttggagtgtttttgacgaaatgttttcaaagttgagggaaaatctaatcctactacattaattgcctaggaaccgatggttcaatgtatggcaaaattcctagcacctctaaatggcctttgctttacctttgtgcagtgctttttgcagtacagtatcatagccacaggacactgttggaatgtcctcccaaagtaaagtgaagatattgggaagaaatttaccaaacgtgtcagatgtctcctccctaccagtattttcagcaaactctttcaacaggtaagtttttacactttctggctaaattagctgacattctcttagcatttatcagagaaaaagaaaacacacttggaaaacttatgctttcttttcttcccaaagacattttcaatttttttatcattcaacatattatatattctttatgctcctggtactaattcaacaagcaatttctgtgcattctcctctgtcactccctatgctagctcctgagaacacaggaaggaaaagcacaaacccacctctggttgctcacctttagggaataagatagagttgtaatctcatagagtgccattacttctgtgatactggcatagagggtgtgtgtagaacccagagaactggagaggcctgatgactggttataatatcactcaaatgatatggtccatgcatagattcaactgtgacatcagatgatctactttgcagttcagtcaaatagactctcttgaagcataagagaacagcaggatctggctcacgaattttgtgttggatttcaaaagggcttagtagcactacactgctatgaatatattttcatttaaaggtttagaccatctgtccacttatttcccaatgaacagctcacttcatgaaaacaatcttttttatattctacctattaaaaaacacatatatcagaacacatacagaagaaacttcagaaatgtaaaaaatacaaccttgtggttttaataacagcaccatggaaatattttgacaactagcttaaaagtgatttttataaggataataagaaaatttatatttaaaaaataggcagtgttaaatcctcttatagattgaaataaaggagtaaggtagaggtcaagtaatgcatatgggtaatagacaggtatgtttggagtggtagctattgatgagtgactgacaagcagagagagagagactgagagataaatatgtatgtgaaggatttcaattattcatgtttcttaggaggcagctcaggtttaacctaatggcatctcatttactgtctgttacacttggaggtggtgtggcaagcccaaagaagcgagtgactttttcaagaaaatccctttgtgacacaggggcactgggaaataacagcttcgcaacagttcctaggagagaaggaaaggctgaaaaatccatgtagctttgaataaaaaatattcaagtgcatttaaatcactcatctaaatttattacgataaaatcatgaattatgttcactccacatttgcaattagatggtacaacagatggtgaatatttacagaaacattaacattctggataagacaagtttaataaatttgtcaatgggagtctctggggctatgggaaaatgtttatatgccaaataaaataggtagttaggtgtgtaggaaggcaagaagaaggaaaggagggttttcacatttccactatggaattctgaattcggtatttgcaaaggtttttattattgtgaggactcaagacaacttcaaaatttgtttcactgaagcccacacattatactaagtataggtctgccagaaaagatgcctatggaaaaactgcaaaacatctatcttcgaacagtccctaaacccagtaagcatcaagttatctggggcttaacttccctttaaaatacaactaatagaaacgtcctcaaaacacaataatctccagtcttagctttcacagctttttcatgccacataaactgtacaccctagaaagttatttattcatttattcaatcaatcaaacaaacaaagaaaaatcatttattcaacatttcctatcccaatagcacaatagtaaatattatattatttatgctgggaaaaagtctattccctaagcattgtattaatatggtaagaatccagaatcttatgtagaatagctttagcttcatcagtaaaattctttcttgaagtacctttgattggatttttctcattttcagtgaaaaatcacagtcatcagatctttataaattcatttttacttagtcactcttattccatcatctcaaacaaatcaacaatagtctttgcaacaaattttctgaaacaactgggcatctacatgcaaaagaagtaaaaaagattgtagacaaaccttactctcctcacaaaataaaaaattcaaaatgaatcatagaccgatatgtaaaacacaaaactataaaattcctagaggataacaggagaaaatctagatgaccttgggtttgataatgactttttagatgtaataccacaggaatgacctatgaaataaagaatctataagccagactttattacaattaaaattttctggtttctaagagatactgtgaatagaatggaaagacaagccacagcctgggagaaaatatttgaagaaaatcatttctgataagaaactgtttttcaaaatatacaaagaactcttaaatatacataatcaaaattgaacaacctgattaagaaatgggcaaagacctgagcagacacctcacaaagacgatacacagttggaaaaaaatatatgcatatatgtttaacatcatatctcattagggaattataaattaaaacaataattggctatcactatacacctaatagaatgaccaaaatccaaaacattgacaatattaaatactggtgaggatgtggagcaacaggaactctcatttattattaatgagaatgaaaaatggtacaacttcttctgaagacagtttgccagtttcttacaaaactaaacatactctcgctatacaatccatgaatcatgttccttgatatttacccaaattagttgaaaacttctgtccacacaaaagctttcacagggatgtttatagcagctttactcataattatctaaacttgaaagcaaccaagatgtggttcagtgaatgaatggaaaaacaaactatgatatatccagacaatggagtattattgagtactaaaaagaagttagctgtcagttcatgaaaagatctagaggaaacctaaatgcatatcactaagtgaaagaaacaaactcaaaaaggctaacatatgtatgatcctaccaatttgacattttgggaaaggcaaaaccatgacaacagaaaaaaggggctccaagagatagggaaaatatggaataacaggcaaaaaaaaagcatagaaggtttttagagtagtgcaaatattctgtatgacaccacagtggtgtatacgtgtcattatacatttgtcaaaacttactgaatgtacccactaagcgtgaactctaatgtaaactctggacttcgggcaataataatatgtcagtgtaggtcaaatttaagaaatgtaccactatggtgagagattctatgtgggagaggctatgcatgtgtgttggaagagggtgtcaaggggtacaagggaaatctctgtagtttctgctcaattttgctgtgaacctaaaactgctctaaaaataaagcctgttaaaaaacaattttaagataaaatgtgcaatgagtcttactcttaagagtagtgtcaaaggtgtacgtacatacatcaaatactaaaaattctataagaaccattttatgttgggtgtgttggctcacacgtgtaatcccattttatgttgggtgtgttggctcacacgtgtaatcccagtgctatgggagtcaagaggattggttgaaacttggagtttgagaccagcctgggcaacatagcgagacccgtctctacaaaaaaatttttaaatagctcagcatggtgaggcatgcctgtggtcatagctacttgagaagctgaggcaggaggatcacttgatgccaagagttcaagccctgatcatgccactgcactccagcctgggtaatgaagcaagaccctgcctcaaaaaaaaaaaaaaaaaagaaccattttatataattttataccaggctacataatgtcttttaaaaggaattcaaggatatgagtaagacttctaatttcatagcttcatagctttctagtttaaacgtttctattagaataataaaactaccactgagttgacacttactaaccaacaacactctgctgaatgttttatatctattatctagctcctccccatatccctatgaagtagatattagtaaaatgtgcaaactgagaataggtaatgtccagagttacacagctagcaaaagatgggaatcaatcatcatcaagctgtctgtctcactccaaagtctcactctaaatatctctgctagcaatattacccattctgcttcatttgttcatgggtgggcaagtacttcatactcaattattttaatttaataattaacctctacaaatctgtagcttctgctaaaatactggaatatgttctgagtttttcccccttttgaataattaatattctacttgcttaactccagcatttgaagttatattttctccagcattgttctgactacaggattggcaccactgcaccactggcactcctattttagtctctgatgttcctgctaatagattatccatctgttattctgtcattctttttgctatataactatattactttatgtagcagtggaccgactcaatgaatatgggatctctagcaacacggtgacagggtaatttagttagaaatctgccaaattcaatatccgatatgccgtgtgtttacttcagcaataaacaaaaaataaggttcatagtattaagactgtataaagcacaagtttcaaacaattgcattttttaatattggacatattccaagaattatactataatactgttatttgaaatttaaagattagagcatagtaagaaaaagaagtaaaaaaagtgaaatggaagatccttttggtaataaaccaaagatatatggaaagagagacagataatgtgtatagtaaaattccatttaatccaaacctagtaatattttcagaaaaagttattataagaagttagatgagatgcagatcttccttgagagcacatgataagaaaaaacaggtatttgtgttaaaacatgatactagtaacaagttaaaatttaatccatgtttgctttttaatattaagacaaaaataaattgagttgtatatcccacaactaaatataaaacacattggcaagtaaacaatacgtagaggaagaaatatagaatgtgactacatgaagatctgtatatacgtagcaataaactagaaaatgaaaaataacccattatcattaaacaaatggaaaaatatataccttcaataaagacactaggtggaagttatcatataaatatttcctttcacatttttaaggaacagaaaattttcttgctacataaactatttcagaacacttaaaaattaaaatgtttctaattcattttgctgagatcatatggccctgaggtaaaaaaaaaaaaattacaaaggtagtacaaaataaagaaaattatgaaaccatttatttcataaataaagatgaaaaagtgttcgcacccaaactcacaaaattaaaactcagcaaaataaagcagaaattaattaaaataataaaacaccatgaccatgtgaagttatttccaaaatatgatataattgaatatttgaaaatcatgcattagatcaatggattagtggcaaaaataattattttgtaaaggctgaaagggtatcatgtaaaactagcataactatttttgataattactcctagaatgaggaaaacaaaaatgtcttcatgtcagtcttcagataatagccaaaggttaagtgtaaaaagggagaaataacatcactcttcttgttaactcttgttaactattctttagtttggaaaatattgttattttgtttaataaaagtattgtttatatttatgttcaatgggtttttcattattttaaaattaacattttaaaaatctcagctttaatttttattgtggtaaatattgatgaatataaccaatattaagaaaaagatcttaggtatcttcaataattgttaaggatataaaaatgtggccttcaggctaaaaagtttgagagttgttcaactacaatcaggtagtcatctcctaaattatgacttgagttttcccatcgctccagaacttttcctcatgttccaggacactacctaggtaactactattctgacttctatcacaatatattattttttggtttttttttttgaacttcaggtaaaattacatacttttaaaaaccattgataatttttatcattaataaaatgtattattttcaaaaattaaactatatgtacatttttagaattccttgatcatagtgttgtattgttttaattattttctggctttattttgctgagctttgatttcttgaaatttgaatgcaaacgttttacatctgtatttgtaaaataaatggttatataattttccttattttgtactgtctttgtaatttttttaatattaaggctatatgatctcagcaaaataaatacatttcttttatgtttatattcctttcttaaacacaataaaatttattcattatgttgcatgccagtagttcattttttgtgttagtttgtaacactactagaagttaataatactactaccaggtagtattaattgtgtgaatataccatcatatgttgaccagttcccctgttaattaacatcgcatcttggttgttttcagttttgggctaatatgaataccactgtgatgaacattctgtacagtttttttgtggacatgtgcactaatttatcttggatatatgcctaggagtgttattgctggattacagaagaggcatctatttaacttagtaagaagtgactaaacacttttccaaagtggtataccattttaggatagcaatacatgaaagttgcttttgcttcacattctagttaatattctagtggccttataatagtatcttattgtagttgtaattcccaaagaaataatggtgctgaaaactttttcaaatatctattggccatttggatatcttcactgatgaagtattcatttcagtattttgactttttaaattattttggaaaggagagggtggagtttgtcattttcttatagatttgcaactgttgctttactctggatgcaaaaacacagagaaatccttaaaatctgggtttccagtgagatgaggaatatgttgtttcactacattaactgttttacacataaaagaagtgcatataatgtcatgttgcataccttaaatatacataataaaatatctctaaaaataaatttttaagaacaagaaaataatttttttaaaaatttgacacatcattagaaaaatagtatggtatatgggttataaaacagctacatttttcccctgtatttgtatcctatgttatgtaattttgctatgctctcccgtatagagtctgcactcacactccgtgactcttgtccttgtttctatgctcagctacataatttattttggttaatgggatattagcaaatatgacgtaactagaggtttaaaaaattgcttacaagtttctcctttctctcttttcactgattccttcctaaaaacatgcctgggtttgccttctggaggatgatatatgaggagcagtgctatgtcagtgtagtcatcacagccgatgatctctctgagcaggtaacagccaaccaatcctcaaacatgtgagatagcacaggcaaaattaacaaagcctactttaccaaaccgcagctgactgcaaatacatgagtaaacccagactaggtaatcactctgccaatccactactgcgaggtaaatacttaattattttattaagccaccgggttttgtggttgtttgttatgcaacacgattgttgcaatagataactgattcacgggggcaattgattgcataaaaggaatttacacaaaaaatgcagaaagtatttaaatgtattagtaaccaggacaatgtaaactcaatcaataatgatacagtttttctcactcattatattggcaaatactttacatttaaaaatatgcaacatagcccagagaaatgaatacaatagtgggactatagcttgttatgttttttcctggaaggcaaatagacaatatataaacatttaaaatatgcattctgacgcagactgctcagccaaagtcaggtgggagcctagaaaggctacctaatgaggtgataaagtaagtgagtgacccctagcggtacacattcccaccatggactgctgcaatcttaaccaccagaaagccccttaacccctgcacgccctaagaaaaatgtagggagcctggagctcacacactccctgagttgtaagcatctacagcaatgcatcattttcagagtgtagcccacaccagagtacgtcccgtcttgtgtcccaacagcctctgcacttctacattcctagatgcctgcatgccaatgatggctattgctgccagggccaaagtataagccattggcagcaagccccaccacccctggcagcagggccaccatgtgtttatatgtgccctgaggaaagtctaccctacttgcagctgccacctagggccaaagcatgtactcctcagctgcttgtttatggctgctgctactgaaagcaaccttatactctccagcaaaaggggcacaccatagctcctgccactcccacctaagtatttcactgggggtgtggagatcaccttgttcctgcctaccacagccagcacctatgtgtatcaccagaaggcctaaggatagttccacctggtttagctctactacctcccaaccactgcccagttccctagaacattcctgaagcctagggatcaccctaacctgtaaaccactggtaggacctgaacactctgactggggcctgaggacaagctgactcaacctgccatgccacaacttgcaccaacctgcatgtatcacctgcagcctggggattgccccaccaaccccactaaatccactacaaacaaacaacaatgtgaaatgcatgcaagacagaggattgtcctgtgactgctaccaccactgtccatgccagtcccacttcccagggttccaagaacacaccaaccaacccgacctattgttgccactgctggtaccaaccaagctgcctggaaacctaagaattggcacacctggacccattaacagcagggccagcatacagtgtcctgaagcccaaggatgggcatgcttggcctgccactgccaccactgggccccaaggactggcccaactgatgctttatcccagcagaacattataacagaccccactaacaacagtgccctaagccacagaggaaatcacagataacactgtttatacctcaataaataaacagagactacactgctgcacacatccagatgcaaagccaaagtgccctatacaacgaacaccatggatacatcttcagaaaaatatcctcccctataaaagcaaattttaaaaattggaagaagtgatagctattccagatgtacagatatcaatgtaaggacccaggaaatatattttaaaaagtgaggaaataagaaaacttcaaaggaacacaataattctctggcaacaatttccaacgaaaaagaaatttataaatttctagaaaataatttaaaaaattatatttaagaagctgaaagagataaaagagaactcagaaaaacaataaaaatcagaaaaacaaatcaggatatgaataagaaatttatcaaagatatatatatatatcattaaaagaacaaaagagaaattctggaattgaaaaattggtgttgaaatacaaaatacatgaaaaagcttcaagattagactagaccaagcagaagaaagaatttcagaacttgaagaatggtcttttcaaataagtcggtcagacaaaaataaagaaaaagatatttataaaaaataagcaaggcctacatgacatatgggacactacaaagtgaccaaacatttgaattttcagtgccccagaaggcagagagaaaaatgaaagggattgaaaatctattctataaaataatacatgaaaattttccaagtctagcaagagatttacacatccagatacaggaaactcagagatcctcaagtcagcacaatgcaaaaacatcttctccacagtatactacagtcaaaatgtcaaatgtcatagacaaagagagaattctaaaaacagcaatagaaaagcatctagtcactcattagggacccccatcaaagtaacagcaaatttctcagcagaaactttgcagaccaggtgatgaaggaattatattttcaaagtgatgtaaaaaaatttagccaaagatactatacccagaaacattatcctttataaatgaaggagaaataaagtctttctcagataagcaaaagctgtgggaattaatcagcactataccagcctgacaagaaatgctgaagggagttctacacttggaataaaaagaaagaggttctacacctggaagcaaaaggacaataactactatcatgaaaatccacaaaagcggtggactgaaggctacaccacagctgtatgcttcccagttctctggtgttgctatactggcgacatggggtccccacagacctagaaattccagcacctctttctcaacccagagcaaattgagacgtccggatgagagttcagttgatttccaaaaactcatgttatgtaaggaagccaccaagaagagcaaagaaaaggagccagggatggcttttcctcagggacacttgattttcagtgatgtggctataaaattctctgtggaggagtggaaatgcctgaaccctgagcagagggctttatacagggaaatgatgttggagaactacaggaacctggagtctgtggatagctctttaaaatccatgatggagttctcatcaacagagcaaggcaatacagaagtgttccacacagggacattggaaagacatgatttttgcttcccagaaatcaagaaagatattcaggactttgagtttcagtggcaagaaattgaaagaaatggccatgaagcacccatgacagaaatcaaagagttaactggtagtacagactgacatgatcaaaagcacactggaaacaagcccatgaaagatcagcttggattaagcttggattaagctttcatttgcatctacctgaactgcacatatttcagactaaagggaaaattggtaatcaagtggaccagtctatcaatgatgcttcctcagcttcaacatcccaaataattttttgtaggctcaaaacccatatttctaataagtataggaataatttcctgcattcttcattattcacacaaatacaggaagtacatatgaacgaaaaacctttccaatgtaatgagtgtggcaaagcctttaattatagctcacacttaaggagacatcacataatccattcaggagagaaacaatataaatgtcatatatgtggcaaagcctttcatcagaagcaataccttccatgccaccatagagttcatactggagaaaaacctcagaagtgtaatgagtgtggcaagaccttcagtcagaagtcttaccttcaatgccatcatagacttcatactggacagaaaccttacaaatgagaataatgtgacaaagtttacagttgcagatcacaacttaaaacacataggagaattcatactggaggaaaaagcatacaaatgtaaggtttgtgagaaggctttctgggataattcatgcctttcatgccaaaagagagttcacattggagagaaaccttacacaggtaatgaatgtgacaaggcttttagtagaaaagcacaccttgcacttcatcatagacttcatactggagagaaaccttaaggtttgtgacaaggttttttggcatgactcatgtcttgtacaacatcagagacttcatactggagagaaaccttacaagtgtaatgagtgtgtcaaggccttcacttgaaattcagcccttgtaatgcataaggcaattcacactggagagaaaccttacacatgtaatgaatgtggcaaggcttttagtagaaaagcaaaccttgcactttatcatagacttcatactggagagaaaccttacaaatgtgaagaatgtgacaaagtttacagtcgcaggtcacaccttgaaagacataaatgaattcatactggagaaaacccatacaaatgtaaggtttgtgacaaggctttccggagggattcatgccttgcacaacatcagagaggttcatactggagagttcatactggagagaaatcttacagatgtaatgaatgtggcaaggttttcagtcaaaaaggaaaccttgcatgtcattatagacgtcataccggagagaaactttacaagtataatgagtgtggcaagacttcagtcagaactcatttcttataggccattgtagacttcatactggagagaaacattacaagtgtaatgagtgtggcaagatcttcacttgaaattcagccctggtaattcataaggcaatttatactggagacaagtcttacaagtataatgaatgtgggaaagcttttaatcaacaatcaaatcttgcacaacattagagagttcatactagagagaaaccttacaagtgtaatgagtgtggtaaagcctttagtgggcagtctacacttattcatcatcaagcaatccatggtatagggaaactttacaaatgtaataattctcacaaagccttcagtaatgctacaacctttgcaaatcattagagaatccataatgaagagacatcttacaagtatagtaaatgtggcaaatttttcagacatcgttcatagcttgcagttcattggtgaactcatgctggagagaaacactacaaatgtcaagattgtggcaaggtcttcagtcaagcttcatcttatgcaaaacataggagaattcacacaggagagaaacctcaagtgtgatgattgtagcaaagtcttgacttcacattcacacagtattacacatcagagaatctatactggacagaaatcttacaaatgtcatacatatggcaaggtcttcagtccgaggttaatccttgcagaacatcagaaaattcatttttgagataattgttctaaatacaatgactatagcaaatcataaagctttaattgacattagagccttcagcattgacttgagattgagttgacttaacattgagttcaaacataattgacattaaaatgtttatgttaagtatgggggtaaccagcccccaatatttcaatgtaggttctttctaagtgtcagccagtctgagaaataaagagaaagactacaaagaggggaattttacagctgggctgccagaggtgacatcacatatcggtgggtccgtgatgcccacctgagccgcaaaaccagcaggtttctattaaggacttcaaaaggggagggggtgtatgaacagggagtagatcacaaagatcccatgcttctgaggccaataaagatcacaaggcaaagggcaaagcaaagatcacaaggcaaagggcaaaattagaattactgatgagggtctatgttcagctgtgtacgtattgtcttgataaacatcttaaacaacagaaaacagggttcgagagcagagaactggtctgacctcaatttcactggggtggggtttttccccaccctagtgagcctgagggtactgcaggagaccagggcatatttcagtccttatctcaactgcataagacagacactcccagagtggccttttataaacctccccccaggaatgcattcctttcccagggtatcaattattaatattccttgctgggaaaagaattcagtgatatgtcttctacttgcatgttcatttataggctctctgcaagaagaaaaatatggctctattctgcccaaccccacaggcagtcagaccttatggttgtcttcccttgttcccagaaaatcgctgctattctgttctttttcaaggtgcactgatttcgtattgttcaaacacatatgttttacaatcagtttgtacaacagtggtcctgaggtgacgtacattctcagcttaggaagataacaggattatgagattaaagcaaagacaggcataagaaattataagagtattatttaggaactgataaatgtccatgaaatcttcacaatttatgttcagagattgcagtaaagacaggcatttcctgtatgttttaagttaatatttcaaacaatcgaaggcaaaacaacatattgtagtgggttacctgtgctgaacactgaatcatttttcctcttaagttgaaaatgattttcatgcaaagcaccttgtttgagcaggcagagtcatgcgtcctgcaggcagggcgagctcctctccatctggggcagggtggcggagaggggcagggacctcagtaaaggagtggagtggggcactggttgcagcagggactgacaattagaacagcttattaaactaggcaaagtcctgggttgtttgagtggttaatggaaactgaaaggtgacataaaaaactgcctactacacaaagggggtgaagaaatatttcatttttcatggaaataaagtcagggcccagagcagtggctcacacctgtaatcccagcactttgagaggccaaggcaggaggattgctcgagcccaggagtttgagatcagcctgggcaagatagtgagacctcatctctactaaaaataaaaataaaaaaatcagccagttgtggtggtgcacacctgtggtcccagctgcttcgggtgctgaggtcagaggatcacttgagccagaaagttggaggctgcagtgaactctgatctcaccaccacactccagcctggatgacaaagctagaccctgtctcaaacaaacaaccaaataaataggaggtatagtataattccttttttaaaaagaaaggaagatattttctttctttttgtctcttttcttaggacatttatttagaaaatttgtaaatgcattttctgtgtcttctgaggttttttttttttttttttttttttacggagtttttctcttgttacacaggctggagtgcaaggcatgatctcacctcaccgcaacctctgtctcctgggttcaagcgattctcctgcctcggcctcctgagtaactgggattacaggcatgagccaccatgcccagctaactttgcattttttagaaactaattaaaccttttttcagcttaatgatccagggatgtatttctgaaaaacttgggagctctctttgaaaggcaaacagcaagggagatagtaactttatctcagtaggaaattaaataattcaaacatcaaataaatccaatttaaagctattgacctttaggtaattctgagccttgagaggaatgtggccatataacctgagtccagtggtatgcaggggcaacttctaagtattttcctgtaagtaattaggaagactaagcagccccaaagataagacctccttggatcattgtcccttctcatggagtgataaagtaaccttcttgaagtgtatcaatctgtaaccaaccaagttgctgcaacctatgcactactcttaaatggaaaatgtcgtgattttgctaaggcgtctctgtctttccctctgtgtgtgaaaccctaatgtctccactttggaacactgatcccattcatttagagttgatgtttccaggtggctatttccaagctttgtgtttaagtaaattctgtacttaaccataaaaaaaaaaaaagaaaatccacaaaagcataaaacccactggtagagtaaaaacacaaataaggacgagaaaagactcaaatgttaccactacagaaacccgccaaaccacaataaaacaataagagagaaacaaaggaataaaggatatgcaaaaaaaaaaaaaaaccccagaaatcaataaaatggcaggcacaagttctcaaatatcaataataatcctgaaaactctgagatctgatgaataaatttagtaaagatgcaggatacagaatcaacatacaaagatcagtagcatgtttacacactaacagtaaactagctgaaaaagaaattaggagtgcaatttcattctcaatagctccaaaaacatataaagtacctaggaatagatttaacctaaaaggtaaaacactactactacaaaaaaaaccacaaaattctgttgaaaattttaaagatgatacaagcaaatggaaagacatcccatactcatgggtcagaagtaatatcattaaattgaccatactacccaaagcaatctaaagatttaatggaaagcctgttaaaataccaatgtcatttttcatagaaatagaataaaggaattctatagtttatatggaaccaaaaaagagccaaaataatcaaagcaacactaagcaaaaagaacacagctgaaggtattacactgtctgacttcaaaatatgttacaaggccatagtaaacaaaacagcatggtattagtatagaaaccgacacacagactaaaggaacagaatagagaaaccagaaatgaacccacattttagacccaaccgatttttgacaaagtaccaaaagcattaattgggataaggacagtctgttcaaaaaaatggtgctgggaaaattgcatatccatgtgcaaaatagaactgaaaccttatctttcaccatatataaaaatgaatgtgagatggattaaaacattaaacatatataataaactataatactactagaagcaaacatagaggaaacacattggactaggcaaagattttgaagtcacagctaagacctcaaaaacacaggcaacaacaccaaaaatagacaaatgggaccatattaaactaaaaagcttctgcagagcaaaggaaacaacagaatggaaagaaaatctattgaatggaagaaaatatctgcaaaccactcatctggcaagtaatatccagaatacacaaggaactcaaacaactcaacaggaaaaaagtaaataatctcatctaaaaaaattgtcaaaggatgtgaatagatagatatttctcaaaataatacatacaaatgaccaatgggtatattaaaaaatactcagcatccccaatcatcagggaaatgcatgtgaaacccacaatgagatatcatattactcaaattggaatgattatcataaaaagacaaaaaaaagatgtatcctggcaagaatgcaaagaaaaaggaactaatatatcgttggtgggaatgtaaattagtacagcccccctggaaaacagtatggagattccttaaaaagctaaaaatagaattactgtacaattcagcaatcccactactgagtatttactgaaagaaaaagaaatcagtatattaaagggatacatgcacccccatgattaccacagcactactcaccatagcaaagatacagaatcaaactgtgctcattaacagatagctgaatacaaaaatgtggtatatatacacaatggaatactatttgaccataaaacggaatgaaatcattttatttgtagcaacatagatgcaagtggaggtgattacattaagtgaaataagccaggcacaaaaaaataaatgtcatatgttctcactcatatgtggaaatttaaaaagttgatttcatggaggtagagagtagaattatacataccagaggctgagaaggattgtgcatgatgatggtagatgaagaggtttgttaataagcatgaacatacgattaaatagaatgaataaattctagtgtttgataacagagtaaggcatctatagttaacagcagtgtgttgtatatttcacaataattagaagggagaatttgaaatatttccaacacagagaaatgataaatatttgagattatgaatacgccaaataccctgacttgattattacacaatttatgcatgtaattaaatatcatatgtatcccataaatatgtatgaatattatgtattaaaactactaaaacaactactgaaataaaatgtgtttcatttggcatagcaattctgattctaagacatgaatgaaagacatacatgtatatactaagagggaaataaaacaatgttcattgcaaaaaaaaaatttcttaacaaaaccaaatgaaaaacaatatcattacctttaaatgtagggtatgtatttcataatatggatatattataaattatttaaataattatttaaatttgtagtacatccatattatggagtattacacagctgttaaaactaataaaaataacttatattctgtgacagagaaatatatctaagactcttgttaagtaaaagatccaggaaagaaggcatataatataatattatttatgtaaatgtgtagttttgtatataagtgtgggcaagcacatgtataaatacaaagaaaaatgatttattgcatacgtcaacatgttagctttgtttattactttgggatagaaaaattggtagggggatgaaagcaagggaaaagtcatgttttctcaaaagagatatttcttgatcttcttcaataaaagcgcatttatttaatacttctgtgataaatgtattcacaagtaaaaggacttgtaataaatgaaacttcaaaacgatctaaaagaccaatacatgaatatttagtatattttagtctatctccagctgttcaaagagggtttaaaacaagaaaaaattcatataaggaagaggtgaataaatctgaatatgtaagaatttaacatttctccatgcaataaaacactgaaaatgtattgagagtccattggcatctttaaaaagcattgtcataggggtggaattagcatcttttatacataaacatttcttagaaaacaggagaaaaggattaaaaaatattaaggtagaaggcacaagatattttcaaaggagaaaagcaattaacaatcatcaaataaaaagacttaaacttggataacaatcaagaaaatgtacattaaaaaatcaacaagatgccattttatgtattaaattgagaaggaataaataatctttcaaaataattctcttaatggaactatagtgaaacagactctctcagctgttgttggtgggaatgtaaactgatagacatttcggagagcaatttagcaatggtttagaaaaacaacaaaaagaaatatgtagggaggttatcagtgattatccctggatgttgggattaggaatcatctattttttgttacttctacttaaaaaaaattaaaaattattaataccttgagtgtccacaataaagttccttttaagcaaatggccttgtgtctactacacagactatcgtgtaactctggcatcggcttgccagaagtttctgattattgggtgagtgttcatttttataacgagactgcagaacactgaacggaggatggaacacaatcccaaccaaacaactcaacattataaagtggacagaagggggaatactagaccgtcattggttgctgcctttggatggtaaaaatgtccaagccaattctttctaccttttgaaaatttccaagttacccaaatgagtgtacactacatttaatttgaccaaaaatgtgtgtataactgagattgggtattttctgggggaaaagattgctctagatctacaggatatcttatgtcctacggtcatttcaatctattttccatgtctcaaaaacagaactttcattgttttatgtgcaagagtttccagtgttttgtttgtttttttaaagatcctgacatcaagaaagcatttctattcttcattccacatatttcttttattaatgtcttcccatggtctttgaaatgtaatttcaaaagctcaaagaagtcaacctccctatacgcaataaaagtttgtggttcttaaataactttaatcttaatactttttactttttttttttaaggtactccttttcatattagctgatttgctcctctttttcccgcatgctgcctacagaaatcctactttaattataccactgctggaacttcaaaagaaagcctcaacacaatggatttattctttttcagtttaattttacttgttaaagaagatttctttagctaccagcttaaaaaaaggtagagctgagttttattaaaccttgttctactgcaaagtttcagttcaagctctttgaaccagatctgctatgatggaggtcagccactacttttttttttttaaagataataacacacacacacgtcctatttttattcttattcttccattgaagttatttctgtgaaaggggatatattccttattctcctatatcatagaatattgctctaaaatctcttaaataagataaaataaatgtggcagcttaaatataaactggcatagagaattaaattaattatccatatacagttaaagttcagaaaatagaaataaatacaaacaaacttagaagacttggttttattaaggacaacaaacaaggggccctgaccactgaatattttcgaaacttttctgcttataattgttgttatttaatccactaaccacccactcctggccataccctataaagccaagatgtggttcatgcatttctttttttttttttttttaactttaagttctgggatacatgtgcagaacgtgcaggtttgttacataggtatacatgtgccatggtggtttgctgtacctgtcaacccgtcatctaggttttaagccccacaggctttaggaatttgtcctaatgctctccctcctttaccccctatcccctaaacaggctctggtgtgtgatgttcccctccctatgttcatatgatctcattgttcaactcccacttatgagtgaggacatatagtgtttgattttctattcctgtgttagtttgctgagaatgatggctttcagcttcacctatgttcatcagccatgcatttctttctaatttcatctgatgccatgttacaatacaccctcaccatgctgtatggttactagctcctaaaatacacaattccttccagattcaaggtatttgaatttgcagtttcctgtactgggaatgtttttgtttctacttcacctacatgattccttcacctataggtgattcctatatttatttatataaataaataaaaacacgcaaacaacccacactaatgagagggcacctcaagggctcttctgtaatgagccatgatttaaagattttataacaatttttttatttgtcttgttcctgcgtgtgtatccaagcctaaagcaatatataataattaagggaggcgaaaaagggcagagagtcacagaatattaaggtagaaaggcgcttgaaatgtctcagtctaaccttttcctctttactggagcctaatcttttactctttactagagcctagaagaaggtggctcctggcaacattctggcttaaataaaacacaagaatatgtgcctctatgcagcagtcctaaaaaaaattcagaagagaaggactaggagttatctcccagaagggtgttcaaaggccaaaggtgagattaaaagtaacagagaatgagctgaaaaacagaaaatgaattctaaaatattctctttgttccagccctgcctgtttctctacccacagcctactctctccccttcactcactgaattcctcctacaagagcattttctcagtcatttcagggggacaaactctgtctcaaatttgttttttatcattttctctacctggaagaattttccttttatttagccaggtgactgtcataccatataatcctcactttaaaacatcacctttagaaaaataaatcaggtacctttgttttattctgctgcagcccccataattttcttagacagaatctatggtaatttttactcatgtagtgtttttgtttctgtctcgctacttgactttagtaccagttgggtacacatttgcatatattttctcacaatcctggagctagaagtccaaaatcaaggtgtcaacacgtaggtttcttctgaggcctctctccttggcttgcaggtggccttcttctcttcaagtgggcacatggtcctctctctgtgtgtgtctatatcctaatctcctttcttataaggacaccaataatattggactagagcccattctgttgaccttggtttaatttaattgcccctttaaagaccctgtctctaaatataattgcattatgtggcactaagtgttaggatttcaacagatgaatttatgagaagtagagaggtagacgtaattgagcccataaaaccattatagtctcaacgccttcctcagagctcggcacacagtaggtgctattacaaaagatatatttataaaagaaatatctaatttagtgcagtgtttctttgttaaattagaaggagtaggaaacaaactactttgattgtataaaagatcatgtcttttataataccttaaatattaaacagtaaagttttctctgaaagattcaggtaggtttctgttatataaacacctcaataagggataatccaataaaattttcagccagaggagaaagagattgatcttgaggctaaaatctatgcatgatttcaaagaatcagatgtttttaaagtacaatgtttagtatttgttttatcaggcatgtgaagagtttttaaaatgcatcttaggccgggcgtggtggctcacacctgtaatcccagcactttcagaggccgagaattcgagatcatcctggctaacatagtgaaaccccatctctactaaatatacaaaattaggtgggcgtggtggtgtgcacctgtaatttcagctactcgggaggctgaggcagaagaatcacttgtacccaggaggcagaggttgcagtgagccgagattgtgccattgcactccagcttgggcaacagagtgagactccatctccagaaaaaaaaaaaaaagcattttacttataaattaagtcattcctcttaaaatctatgaagtagacacatttagatttggcttttgttagttcaataatcagaagataatcagataatctcgttatgggcatagttaaatgtatctatacatgtattaaaattcacagaactgcacatcagaaatgagatttcttcatagctttgtccctgttttagaataattatgggaataaccataaatattaattcctatttaatatgtatgtagtctggaatcccgaggtgtgaatagcaatatcttattacacaaaccagagtattcattaagtgcttttggataatctttagagagtacattaaaattcaaatattactagcatatgagtagtctgcagaacttaaagaggtatttcagaaataagaggtgaataccttcctggagtaaaaacttattaatcaaaacattcaaatgaatatcagcataaaagaaaagaaggtcaagtgattacgtggagccgaatttaacaataaactcaagagaaagatattttaataaaagagatattgtgcttcataattgcagaattccacagtactttagttgtgtcaatgcagtttacctgtaagtgctttgttgccactactgttcttcttttcattgttattttgttctcttcaattttgacttgtttttatgctagcaaagcatttacatatttttgtgacacataagaaaagagaccttttgaaagtgtaactactatgaattttgattatttcaatgctctttttatttttaaactactatataatacaattcacttttttcttctgatgtgcagttttatgatttttaacaaatgtatagatacatttaaacatgcccataatgagattaaaaccagttccatcaccctaacaaacctccctagtgttatccctttatatttacacccttccctccaacccaactcctggcatacaatgatcctccactatagttttgcctttttgacaatgtaatgtaaatgtaaacatatactatttagctttttgagattggatcctttattcagcataatgcctgtgagatccatccaagttgttgcatgtatccatagttctttcacttttattgctgcataatattatattttatagatttactaaagtttttttattcattctcccattgaaggacgtttgcttgttttcagtttttggcaattatgaatagacttgctataaacattcctatgcagattttttgtaaagcaaaagttcatttatctaagataaatgcctaagaatgagatttctggctcatatgatagatgtatatttaaatttataagaatctaccaaattattttttagagtggctatgtaatattccattctcatcagcaatgtcttagagttccagctgttttacatcctcactggaacttactgtcagtattttttttcactttaatcattctaatgataagcacaatagttactcatcctagtttgtttttttttgtttgtttgtttgtttgtgtttttttgagaccgaatttagctcttgttgcccaggctggactgcaatggtatgatctcggctcactgccacctctgcctcccgggttcaaacaattctcctgcctcagcctccctagtagctgggattacaggcatgtaccaccatgtccaactaaaactgtattttttgtagatacagtgtttctctatgttggtcaggctggtctcaagctcccaatctcaggtgatccgcccacctcggcctcctgaagtgctgggattacaggtgtgagccaccgcgcccggcctcatcctagttttatttagtattttcctaaaggtgaataatgttgaaagccctttcctttgcttatttactattcttatattatttgtcttaaaatgtttgctcaaatcctttgcctatttttcaattttgttgtttattttcttacctttgagttttactatttttatattgtttgtacaagtcttttttggtagttatgtaatttgcaaatattttctttcatctggtagtgtgcctttcaattcttttaaaatgttttctgcaaagtaaagttaatttcagtgagattcaatttatcatttttatgaactataattttggttatctaatcattctacctcttatgaatatatacagaaatacctgataggattttgattagtattaggttaaatgtataaatcaatctgaagagaattaacatgtttactatattgattatacacatccactaacatagtaggttgccattaggtttcctttgattcctttcatcacaattttgtaattttcagcatacacattctgtacatgttttgttagatatatacttaaggatttcatcttttattgtaattggcttggctttttcttttaaatgttaggttctaattgtacattgctagtatctaaacatacaattggttgttgtgtgttaattttgcatcctgtgactttgctcaacacacttattagttgtaggaggtttttttttcctataaattctttgggattttctctctctatatatatagtcatgttgattgcagaataaatagttttctttctgccttcctaatttttatgtttattatttgttttccttgcctgattgcactagctaagaccactggtactatgttgaagaggagtggtgaaaacgagtatttttgccatctcctcaaccttaaagggaaagcattcagatactttttaataagctagccacttttggtgtaccagcctgtgtaaaagatcccagtaagcagttggttgttgtttgtttgtttgtttgtttttgagacagagtcttgctctgttgccaggctggactgcagtggtgcaatcttggctcactgcaacctccacctcccaggttcaagcaattctccctgcctcagcctcccgagaaactgggattacaggtgcctaccactatgcccagctaatttttgtatttttagtagaggcagggtttcaccatgttggccaggctggtctcaaactcctgaccctcaggtgatccacccgccttggcctcccaaagtgttgggattacaggcatgagccaccgtgccatctgcgttgcttttttgttttgtttttcaggtaaaactgtatctacaaagtagggctgctgtggttgacatccttttcatctcattaagatgacaccctgagttccaaccctttcctccagccctctctggggaaggaaagaagaaaatccaatcaagtgaccaaaagtggaaaagtggttattgactgccacaaaacacatctcttttgagagcaatgatattcacattcaaagagccttttatgtgggctcagcattgttttaacctataatttgggttcatattctttccttttggtctacaaactaaaattaaaagttccttctcttttaaatgtcttgcattaaaggtttcttaattcttttaaactgtccagatgatctagaaataatttaataagccacaaaaaataattctggaacaaatatcaacacacataaacagaatacatgagatgcatgcttatatacacatgctatgttatacacttgtatgcatattacatacatgatgtgcatatatatttatatatggatgcaattggataaactcctcttaaaactgataagcaattaataatgcttaatactaataggtctctcaattggaactctagaaaatcaggaccattttaatgaaaaaagaaagcacgtactgtaataatgttgattctctattcacatcccagaattgtgttaaagactcagaagataataggtataaagacccttaaaatccttagagaaagttttgtgtaaattttttttttgtatttgcataaccatatgtatgctaataacaaagtttctctggagatgctttcctgccaggggcactatattttaaagatgatatcaagttacgtttatcatgtgagaaaataaagcaactttggtgtagcaagaggaataatatacaagctcaaaaataaagtcttagaaggaaaaatgatgcacgatctcaataacattttacattcttgttgcacatttcatcctaaagatcaacagaatgttccaactaatcataaattcaggagttattcaacctcctgttttaagaaattgtctcagggagagaagacgataactatctttaaacccacccagccacatagttcaatgacttaggatagaaagtcaaaatctcaagtaagtttattgacttttcatgtatcatgtcagtcagagcttgagtcaaagtgggtaaactgacccaagaaagtaatcaaaatctacacattaaatttgtacatctgtatatataaatcttgtttttaacaaataaaaacaaaatttacacaatttagttgttcattgctgtcttttttctataggcattttatcacaaatgtctaatattatgaacaaaagcgtaaaagagagaaaattgagatctctttcatagttagcctaactttttcatgggggaaagaggtgatgattttttccataagatttcctagcccatggagaatatgagtcttctgcagtctatctattgcaaagcttcccatcttaagtgaaatagcatcctccttcaggcatgttgttgctaggttactattaaatagaattactatcatgcaatatattcataaaggaagagtcttgatataagtaagaaaataattataataactttgtcatgtttatgcaacttgatgaattaatatatatccaaaggcattatttaggggagggaaacaaggtagatttattttccattttgaatattcttagtgattcattgaaagtctcttatatatcccaagcaccttgaaagcaattcaattaaagaggataattaatccacaattccaggatttctcataaacagtattgtagctgattggcacaaatgctgtcattaaacagaggaaagttacaaatgttagatttagagggtattttgagttatatttattctagtctataactattacaaagaaatgcaaaataccccagtttaggtattatgtgctttattattgaagagttccatgaaatatcacatctaccaatggtttggtggagctgatacttttacttacccttgttataaaaagcaatcatcatttgtgtatcagaatcacttgacaacttttttaaacatgagatgcccaagccaaaaatgtgtagatggagactggcatccacacatccatatgttttaaaagctgcattgcaaaatttgataagcaaccagagtagagacctgcaggtctgtagactattgaacagcatgttaatcctccagaaggtttaaaaatgaaagggtagaggcacataaactttaagattatgcatcagttttgttaatattactagaatatcaggatcacaatgtataatttacactctagaggaacaattttaactaaatttatatcttataccaggcatcttgaatctttctcatttgcactccagaaattatactgctttagaaaaaataaaacgatacagtgagccactaactctatctgcaaattttttaaaataaaattagaaccaaattacacctctaaagtgtaagcattggatttggacattttttgcaagtgaagggtaaaatataaaacctggcaggaaatggaaaatagaatttttttccacttacctttttataaaagtgactgtaaaatgtgcaaaatcaccattgacattcaggcaatccctgaaaaataggtttgaataggattaaatatgaattgaactaggtgaattatgcgtgaccaaaaaaataatgcaagatgctatagagtacactgattttttttttctgaaatctatttctctagattgatggttcagtgagcaagaataaatgtttttatttttttctccatttcacaaaaaaggttttatttcatgtctcatcatagacactcaggctaactaatatagcaattaatatccttcgttttaagaaaattcagaaaactggagagctggtaggatttccaacaattgaaagagaaatcatttcacatttctacttttgccattcttcatactttttacctcccagctgaaatgcagcaagctaaagatcaagtttttattctaattcttcaatgggaacaatcagcttgttacttacttctctttgcctttcctccccatgtcagcctcaggtagaccagctctctgtctctggagaagggcaaaatcgacttggggcctctcagagaggcctctcattcctgcaaccctcaggcaaaggctttattgtctacagctgagccccagccttgctactttgttcttactgtttacaggtgattcccaaaacctgcaacagaattttagcattaatcaatgagtgaggaagtgttgaaaactgagtatgcaggataggtaatactttctaacagggagttatctatctttcagagtttattatcagtattaaattttcagatctatgtaaatgcatggaaaaatctgaaaagataatgtacctaactgataatagtggttatctctgggaaagtgagattaagtttggagattaaagtgatctttagttgttctatagtattttgtgtaattaatttatactttatgatattttaattttatttaaaaaactaatgtgaatttaatgcatggttaacatttaaaacatttaagaagcattctatagaatatattgtaaaataaagactccattgttggaaaccttgccgatgcaaaggcgatcccctctctttcagaatgggaatgctcctaacctattatgattgattctagtcagaaatatattattctgggtctactaacacaaaagactagatattgaattattgattttataactttgcttatcaatggagggagtaagaggagggtaaagaactctccatttctatgcccaagatagacatctctgaacttgcacatactttcaaaacccttctcgggccgggcgtggtggctcacgcctataatctcagcactttgggaggccgacgcgggcagatcacgaggtcaggagattgagaccatcctggctaacatggtgaaacctcgtctctactaaaaatacaaaaaaaaaattagccagtcgtggtggcgggcgcccgtagttccagctactcgggaggctgaggcaggagaatggcgtgaacccaggaggcggagtgtgcagtgagctgagatagtgccactgcactccagcctgggcaacagagcgagactgtgtctcaaaacaaacaaacaaacaaacaaacaaacaaaaaactcttctcaatacagtgttccagatggccactattagtctgtatgtgttggttcatactacctgataaagttttctctggaagcaatggtgtcataatataatatatactaaacttctgtactgcatctccttaacatggggtgtatgagaataattcagtgagctttctaatatacacattcataagttcctatgctagtaaattgattttgtagaaataagatggaatcttaatatgcatgtgttaagtacaaaacgtccagcttattctgatagattggttgtgaatttcgggtagtataattaacattatatatttataaatattgatggccatgtaggcctattacatgtaacttcagatgacctgggttggagttctgatcctagaacttattagtcagaattctgaccttgggtcatcatagagtcaccccaagatttaggttcttcattgacaaaatggaattacttatgttgcctctatttctcatacttaccacaatgcaaaaggatccctggtttggccatatctgtcgtgggactgtggaaaaatcacttcacctctgggtcctcagtttattcatgttcaaaagttggatggttcaactagatctgtgattctcaatctctattctgagtcgagaccccaggggtgaagtaacctggggaaatggaatgtaacatgtaacaagaaataagatctctaatcctcttcccccacagaagccacagtgtcatatgttttcatactggatatttatgtgaggttctttttcagccatatatatcttaaagcaccaatcaaaataatctctgaggtcatatcagctcaaaattctttgaatctaattcccaagattatagagctcaaattagataatgtttgttagtttggcttgtaaaatgaaaagctatcaagctgaattgccttgaaagttttatattataagctaaaatttcctgagcttcctaaatggactacctccatactttctttttattgtcagtattagcttaattcctcttgcccttgcacccttatgctgctcataaattgacccttctttcctgatcacaccctttcaccagattctctgcttccagccaaatgcagacatcagccaatttcagcagaagtagagcacgtgtttgtagtaaccctcttctctctccttttccatctggcagtgcctaggaatagccacgtgtcaaccttagaatatggacattcaaggaagatttctgagtttccatattaaccatcttaacctctgctcaaaattgaatctatggcaggcagcacttccttgaataacatagctgagcaaatagttttgtcttgacagttgggtctcttcagaatctagctcaacttgcccttctcacaccttattcacatacccataaatgtgtcactcctgaaggttctcaacatgaaaatgctgaattttgaatctagccatttcacactaataattcccacacatgaattagtaatgacacagttcaactagaacttaattcataatgtgcctacttgcattagagtcagaggttacatagataaacagtgattggccttgattggcatggtaactcatgaagaagtcagatgtataagattagtatagatgcaatgcagtcaatagaaagataaaggtctgtatggtgtgttatgtagcatggggcatccttatctaatttgtatgctccaggtagtatcatggaaacatatgtttattcatgaaaactaaataagacttagccaaataaagagaattgggaagggttttatccactgagaaaagagcatcaactataaagcaggcaaaactacagtttgttattactaacgcataatatgtaaagtctgtgcagaatgactgaaaacatggttgaagaacaagaaagtgtcttggaaggagtttgtgctaacgttaaagcttttggactttattcagtaagttataagacaacccttgaagcgttttaagcagagacgtgatctacttccacaaattctgcttagttttacatatgtcttgaaatggtttgtttgggtaaacctctgcttctaatttgctatttacatttgcacatcaaaagatatttttaatggaaaagtacatgtaaattatatgagaccagtgctgtaaatgtaactactctgaaaacattttgcaattactgctgtggaatatgttaaagcatatatgtttacattgaaatccagattcctaaatgttaacctatctctgaatgtttgcaatgattccatcttggcaaacacatagctcatttattgaggcttacattttactgacactggcttaacaaggcactagaggctttagcttacatttctccataaaatgctgttacaattatgcaggtctgttcctgcggctgccattgctctacctaattattttttccgtactcatttgagtgtttcgattcttttttttcaacatattatcggcttcaaagtgttctgaggtcctcttacacatttgtgatatttctctaaactagatttaaaatgtgacagttggctatcttttatgaggcagtttggaatttttggattctctgcacttggaggttgaattggtggcatcttcagtatcctcttgggtgtattagtaggaaggagatgataaaagtctagcctagttcttcttgcccctgtccttttatgttctttatttctccttgccacccccttttccacatacttttgaataatgtaaaagaagagtgatccaaattattttctccatttcatttctacataatgagttctgattttttttcctatttccatttaaggctatctcagcagagaaggaatgtatttcggctctgatctttaacactgaaagaccggcaacacacaaacatcacactgttctagacaatggactttatttttatttttatttttttgagatagagtcttgctctgtcacccaggctggaatgcagtggcgaaatctcagctcactgcaacctccacctcctgggttcaagtgattctcctgcctcagcctcctaagtaactgggattacaggtgcgtgccaccacgccaggctaatttttgtatttttaggagagatggggtttcaccattttggtcaggctcgtctcgaactcctgacctcgtgatccgcccgccttggcctcccaaagtgcctggcctagactatttaaaacagtatctgagtagtaggagtagtaataattacaacaacaataataatggctatcagtgactgagaagtgactgttatgacttacatatgacttgcatgaagtatcacatttaacttttataacaatcttataaggctgtcgttaatattatctccaatttgcagaggagaaaacagtatttatttagattgaataaattttcccaggcagctagtaagtacaagagatagtgttcatccccaatctctctgactttaaaacctgttgtgttagccccacccgatgtctgctttgcaatccataccttcagggattcattgatttcattcagcaaatgataatggatagctcattcttaatgagaccatgtattacaaactgcaaggatacaaagaggaattaaaacctggattctgctctcaggaatcatacaatatagaataaaaataagtataataggacatagaaaaagaaaacactgaaagagcacaatgtacagcatgtgttatctaaattccaagaaagaggacatttcccagctggatgatggaagagctcttaaaagtatggtctcactaataatccaggaaatacaactgaaactacgattaaaaattctgccagccgtgttgactctcccttgtaatcccagcactttgggaggccaagttgggtggatcacttgagaccaggaggtcaagaccagcctggtcaacacggtgaaactctgtctctactaaaaatatagaaattagtccggtgtggtggtgtatgcctggagtcccagctacttgggaggttgaggcacaagaatcacttgaacctggaggttgcagtgagcagagatcatgccactgtacgccagcctggacgacagagtgactccatctcaaaaaaaaaaagaaaaaaagaaagaaagaagaaagaaagaaagaaagaagaaagaaagagaaaagaaaagaaaaaaaatccttacatactgaccagattggcaaacattttaaaaactaccaatagtgttaaagaggatgtagagcaaaatgaattaatgtagaatcgatttttcgtaatctagaatacctgaaagtgcacatattctagggtacagcagttcctctcctaggatatcccttacagatactcttttatttatttatttatttatttaattaattaatttatttatttttttgagatggagtctcgctctgtcacccaggctggagtgcaggggtgcaatctcggctcactgaaagctccgcctcctgggttcacgccattctcctgactcagcctccccagtagctgggactgcaggcgcctgccaccacacctggctaattttttgtatttttagtagagacggggtttctccttgttagccaggatggtctcgatctcctgacctcgtgatccgtccgcctcggcctcccaaagtgctgggattacaggcgtgagccaccgcacccggcccctcacagatactcttgtacaactgtaccaggagagacacacagtatgtttcattgaagcattgtttataaaaagccaaaattggataacctaaatgtccatcaataatagatctgactaaaagaaaaattatgatgtatgtgataggatattatatagcaattaaaataaatagaccataactaaatgcattaacatcagggcatctcacaagcaatgttaaatgaaagcagataaaatcatataagtggaaatgattcctactgtagcaatttttaaaagaggcaatgttgagctatttcttaaaggataaacatataggtgataaaactgtaagtaaaaccaggagaatgattaccgcaaaggtcagactattgatggtctgtattgcagaggcagtcccttgtgcacgcagagggcttacattgctactggcaatagtctatctcttaagataggtgggagttacatgagtgattttcagttagtctttatactttactattatcttttttgttgctttttaaattttttatagatacatagaaggtctatataattatggggtacatgagatattttgatacagtcatgcagagtgcaataattacaacagggtaaatggggtgtgtattagtccgttctcacactgctataaagaactacctgtgactgggtaatttatgaatagaagaggtttaattgactcacagttcttcaggcttaacaggaagcatgactgggaggcctcaggaaacttacaatcatggcggaaggcgaaggggaagcgagtgccttctttttatgttgacaggagagagattgaggggacaagtgtaacacactgttaaaacaccagatctcaagagaactctctcctcttatgagaacagcatgggagaaatgcaatcccaaggtccaatcacctcccaccaggtccctcctccaacattgggaattacaattcaacatgggatctgggtggaaacagagccaaaccatataatggggtatccatcgcttcaagcatttatcatttctttgtattataaacattccaattatactcttttagttattgtaagatgtctaataaattaatgttgactatattaccctgttgtgttattaaatactagatcttattcattctgtataactatatttttgtatcaattaaccatatccactccccctaccccactgcccttcccagcctctggtaactattattttactctccatgagtttaattattttaatttttagcccccacaaatgagaacatgcaaagattgtctttctgtgcctggcttatttcacttaacataatgacctccagttccatccatgttgttgtaaatgacaggatctcattctttttatggctgaatggtatttcatggtgtatatgtaccacactttctttatccattcatctgttgatggacacttgggatgcttcctaatcttggctattgtgaatagtgctgaaatgatgagagtgcaaacatctcctcgatataatgacttccgttcttctgggcatataccttgcagtgggattgcttgttcatatggtagttctatttttagttttttgaagaacctccatactgttctcttttccaccatcagtgtatgagtattccctttttctccataacctcaccagctttattattgcctgtcttttggataaagccattttaactggggtgagatgacatcttattgcagttgtaatttgcatttctctgatgatcaatgattttgagcactttttcttatactcaattgccattaatgtgttcttcttttgagaaatatctattcagatcttttgcccatttttaattagagtgttagatgtttttcctgttgagttatctgagctccttatatattccagttattaatcccaaggcctgtggcaactattgcctggctaccactaatatttattcaaggcccaaaggatctttggtgagcagttgatgaattcagccaggcttgtgtccttcccttcagggtggtgagttcccttctagttcagggtaggtttagaaatgttatctaggaattaggtccaggagttgaaaactttaggaatctacttggtagtttattttactgtggctgaactggtgtccaagttgcaagacaaagtcctttttactcttccttttccttttctcaagcagcgaagtctctccccatggccacccctgccccagtatggttacaggtactgcttgctacctctgatgtttattcaagggccaagggctctttagtcagcttatggtgaatcttgctgggcctgagtctctcccttcaaggaaatgggctctcttctggcccaggggaagtctagaaatgccatccaagagccaaggcctggataaaagactttagtattctgcttgatgttttattttactgtggctaaggtgttactttattgtggctaaggaagagtaaaaaaaaaaaatcctttttactcttcacttgcctttccacaagcagaaagagtctcccccatggccaccatagctggtaatatgttgggtcacacctgaggccagcatgctacagggtctcacccaaggcccatggtgaatactgcctggatattactgatgttgattcaaggccctacaattgtcttttaaaatgcttacatgtcacaaatattcctctatatgtaagagattgttttgtgaaaggaaaatatcttggacccccaaaatcactaagctaaaaggaaaactcaagctggaaacttcttagggcaaatctgcctcctattctattcaaagttgtctcactgctcacaggaaataaatgcgtatctgatactttctttggaaaggctaatcagtaactcaaaagaatgcgaccctttgtctttttctctcaccattgtgtgatctgaaagtcctctgcccacttcaagtcttcctgcctttgcttcaagttgtcctgcctttccagactgaaccaatgtacttcttatgtatattgattgatgttccatgtctccctgaaatgtataaaaccaagctgtcccccgaccgtcttgggcacatgtcgtcaagacttcctgaggctgtgtcacaggtgcaagtcctcaaccttggcaaaataaactttctaagttaactgagatctgtctcaaattttgggggttcacagttcaaatacatacaatttttatttttgaaagactgaactaagaaagatcttgtaatgaaaatgtcatttacgtaaaaataaaaaaatagggatttggaattgtggagaaagataggaaggatatcataagaaaaatgtttgtacttcctagtgatactaatttaggctgaggtcattataaaacattaaatgaataatcagaatcattgtgagagcgaaagaccttaagtaattaatatgtgtgtgtttagagaaaaatagggaggtaacacatgcctgaacatgggcttttgtgaacaatagtttctggggatgattgtgtttaagctgaaacaaggactaaaatcaacaaaattaaatgtgactgggaaattatctgtctgttgtaggaaggtttaagaatgtgtctgagatgaagcaacacttatgtaacagacagcagtgcaagatgtagtgaattagaccatttgaagattataagccctaaaatgcatttacaatctaaaagcatatttttatattaatgcatgttacataaaagcagaggtggttaggtagtgagcataagaaaaaataggtaaatattgtgatacaaagagtgcaatcttttattgaggaaaactccaccaaaaatccaatacaggaaagcaaagagtgttcaaatctttgaaatttagatgtagaaatgatgagaaatataagtttttcaagcatgaaccaaaattcttatgttcctgtagctgctgaagacgtccatccaaaagcagtctagagcttatacatcttaaatgcattcagaggtctgaggaaaagcagtggtgggaaatgtgataaaatgaagagaacccacattacatacatgtactcaaagtcaattttggaaaataagtaatacaggtatccctcctcctcaattcaattccatcttcaggccaatagactgtgatcttttttgtttttttttttttttttttttttttttttttttttgagatggagtcctgctttgtcacctaggctacagtgcagtggcacaatcttggcaacctccaccttccaggttcaagcaattctcctgcctcagcctcctgagtagctgggcctacaggtgcacaccaccacatccagctaatttttgtacttttagtagagatggggttttgccatgctgaccaggctggtctcaaactcctgacctcaggtgatccacccaggttggcctgctgaagtgctgggattataggcatcagccaccgtgccgggccagactgtgactcttgatggccagttgcctcggatgaagcacagagaacggtttgcagccacataattgggaagtggcatagcactatgtaagtctacttggtctactgccttatggttcatcactttttcaattagcgtagcatgtttcccctttctcagtattatgttgtcaactgagagtggtaggaggttggagaagatagggtgatttctattgtctatccttacatgtggtataagctagtctttccatttcaaaagtactatcattttgaaggcacgcgaacctaaattaacatacaggtgtagatttttaaatctcatgaaaaaaatgaggtcattgtcttcagcacattcttgacgttttaatgaagcatattaacaaaaattatgttccaaagtcattatgccgagctattattctttgttatactagaacatcactgaatctgaaggaaaaactcccactaaaattatgttatggtaatattatcaataatgacataattaccgtgatgttaataacaatatgagggacttcactctaaaatatcacttcatagtcaaacaggttgagtgtaaataagaagcaatcatttgtagctcatgggcaattctctgcttaaattttcataatgtaatttgcaataaaaaatgacagtactaagaatcacactttacttgtcaacaggaaagcttcactttccctattatccttcagcaaaactatccattccaggtcattcaaatttttcattcttccaagattctgatactacagtgaaaatattaacatactctaaacttggatctgtataaataaattatgtcttttaatattgctgccccatctattccactagtatcattactattattattacattgatcacatgaaattataattggcagatttagcgattccaagattgaagtgagtctaaactgtgaagcacttattcttttaccattattgttgatccatcaggttaaacaactcattttactaactaaggatattctccactaaaatataagatagaagaagcatttttggcttccacacttaacagttaaagggcttaaatggtacttaaattttctgatgcttacttgtatgttctataaaatgggaagtttcaaatggaagaatagcatagcaaaaaaccaaagagaatcacctgggggagactggctggccacatggggaaatgaattcaccttttccaagatcatgccctcggttcatcagacgtagacccagtcattcctaaagttctggagttaattaaggatgataatttacactagcaaaacttgcaagatttggaataccaaagatggtttatgctaatgctatattatgaagaagaaacatttatctaagtacagtataagccacacagagtccccatcaaaatcatgaatagaaccattcatgctatttaagtggagagttgcaccacatgttgaccaaaacttgccatgggtttattcagcttattgccgccaaatattagccagacatctacgatccagaagaatgttatgctctctaacatgtatgttcaagccatttgtcttttgatggtcatcttctagctacacagagactgaaccaaagctttgtagtgacaacttttctatacttggccaatctcaacttttaaagttccctctctagtactctataaaataaggatgtattgcccctttgtaagtatataaacaatttcagaaatatacaaacatagaaacaacagtaataataaacccttatgcccctatcacctagcataaacaattattaatatccatatatagtttacctatactgcccttcaccctattatccttttttaatattcacaagaaccctgtgaaatgagtttatcatctcatttttacaaagtaactgatgatttgaaagatttaataattttgcagaggtaacatatagtgaatgccagatccaagaatcaaagacacctctgtctattccagagtcctttctctagcctgcttgtgtgtattacatgaaagttagcagattctagagccacatgaattgctgtatcagtcagagcactgccataaaatagatggcacacttaaattgggtaatttgtggagaggttaataaagtgacaatttacaaaggattcatgaagttccaagaactagtaaaatcagaaaagagtataaccaatcctaggcccaaataggcaaaggaaatgagtggttactagaatccagattcagaaatgaccgtgtggtcacatgataggagccattattttcagttcaagaacaaagccagcctgggtgaatccacagagattggccgtggaatatctcaccctctcttttcccatttccctgcttcttaattggccaaattgaatcaaatgccagaggtcagggtagtctactgacacattccacagagggtcagcctcccaggacacagaagagtaaaaatgacagatctagaggggataaaagatgatattcagcacaattgtctactaggtggagagaatacatggtatgttatcttgagataataaccctattttcatcagaaattagaaaatttgatggaaaataaaaaataatacttatctttcagtagaaaagctgcattacttattacactggcaaagtagatagaattttccaagaatttctaataatcattaaacccaaatctgagtcaaatagtttagaaatgacttgtatacaatatttaaagtagcaggtaacctacagagtatatgtttgttgaatacatgttggtatagagcagcataattgggttttaaagtcaatacccaaaatattagggagtcatatgctgagaccagcttggtcatggagaccctaacccagtggtgctagaggaattaagacaaaggcatagaaatagagtgcaaagtgggaatcaggggactgacagccttcagagctgagagccacgaacagagtttgacccacatagttattgacagcaagccagtgataagcattttttctatagattatagattagctaaaagcattccttaggggaaacaaagggacaggctctgacttgttatctgcagcaggaacacgtccttaaggcacagatcgctcatgctattgcttgtggtttaggaatgccttgagcagttttccgccctgggtgttccttgcccttattccagtaaaccaacaacctctagcctgggtcatagccatcacgagcatgtcacagtgctgcagagattttgtttatggccagtttctcatggtctgtttatggccagatttgggggcctattcccagcaggcatagaagcagaaggtaacagctacattctttttttttttttcttttcattacactggtgagccaatggtagatatttattatagaaataccacccttggctgaaattcagaattgctggggtttgaaaagatgcagatgcttaaattcatcccagcctcacctattcaatcaacatcaccaagcaagggcttggcatatgcacttgttaaagcctcagacatcattatcatgcatcaccagggtaaagacatcttcatttgtcttgaagtttttgctaacaaatacatgatgtatctaaagttttaatgtggagtgaagaaggaggaaatccaagaaaactttgctgaaatataatttccattaaggtagaaatttgtgtctcttttgttcactgatatattccaaatgtccagaacagtaccacagtgcctaccacagagtagtaggtaatctataataatttgttgataaataaatgatttaactcaaaaatgagataattaatacaaagaatttagcatggtgaccatcaaattatggcataacaattaaatctttttaattcttctattaattgattatatatatatatatatatatataatatatatgcttatattggcaaattgcccaaactctcccttttgtcacttttcagtgtagtgctgcatccaaatcctaggcagagagaaataaataattgtataaactgccattgattttcacagttgtaccatcctttgggaagacagtccacaaagccaatagaattgatgttgttctgaattgttattgctgtgtatcgcttctgtacacaggctgctgtgtacaggctgtgtaacaaaaataccataaactgggtggcttatacacaatgaaaatttatttcttacagttctagaggcttggcagtccaagattaaggcaccagcagatttagtgtctggtgagggcctactccccatagtgcatcctcgctgcattttcccatggtgaaaagggagaacaagcttcctcagaccactttttaatcttgcccatatgatctaatcaccttccaaggaccccacattttaaaacaatcatattgggggttaggtttcaacatatgaattttaggaggacacaaacattcaaaccatagcactgagtgaatacactttctagtccaaggttctatccacaaatattcctcttgcccattttccatattgtatattcttatgcctgtcaaagtgtaaaatatgccaggatggccaggtcataaggaatgttaatgcttcactagaaagagctcttcctcatgaaaattgagggtgttgcataactccaaaggcaccagttcagatgcccctttgtcagcttctagccacccgcctagtaaattcctaacaaggttagttaaccatccttccttcctccctcctttcccttttacaaagaggctttttcccatattttagagacaaaaataatgtggaatcctcagcatcgatcactatctaaccatttgagttttaacacatacaggaaaggaatatttatagaatgccacctacatatcagacattggatattccaaggtaatatttagtaaagcatattctgcctatcactattcttataggcttcaatttgtgctcagtgatcaaaagattccctgacccacatattgtacaattctattcatatgagatggtcagaacaaatgaatttatagagacaggaattagataagtggtttctaagggttggttggagatggaggcacagttggtggtgatgaataagagatgtcagtttcttttgaggatattgaaagtattctaattattccggtgatagttacatatctataaatattctaaaagcagttcatttaagtgggtgaattgtacaatgtgtgagttttatctcaacaaagctattttgaaaagaaaaagaaaaacactccatgataagtaaatttagaagaactcattactaaaatacatttgcataataaaaattctgaaaaatcctacagtgaattatacacagttaaagtctagttaaacttatttgtacatggatagcctcatttgtttgttttgcctcagtatatccactcaaatccctaacagttttcccctaatgtttttctaaacagaagttagggaagtacaattatttgacaagaactcttttaatgttcacaacagttcttcatgaaagtagttcttcccattttagcagatgaaatactgaaactcagagatgttaacaaatttgtccaagatatcacagacagtaagagatgaagataagatgtgaatctcagtttccacacacatccatgtaattgaatgctaggtaaacattaagaagacaatgcaatctatatgtattgatgtgtagacagagctacaaaaaatctaaagaaaaaagcaggcaaacacattgcttatgcagtttaaattttggaaaaagtatttatttacatgtgaaaatgactatattgtcagtgtgtacatatgtgtaagatatacactaacgagatggtaggcattacagactgactaaaaatggattcacaacttatgattatattctaattattcaaaaagacatgtgcattaatcgtaaacaaaaaatcatgataagtaattatttccttttaagtcccacccttttattttcactttcctgtaaggaccaaaagcatcgatgaaatctgtttaatatgatagagatgtagctatgaatcccaaatgtcctttttcaaaaatacaggaattttgagttttaaaccaaatttttcagattaacccttattttcatatttttgttaaaaattctgcttctgcatccacagaaataataaaatctagaatagtcactttctttttatacttgataagttgttgcaacataaaaagcacacacaaaaaattagagtcaaaagggccatgagaaataaatgagttaattcccattgttgtgaagatgaggaaaacaagtgcagagaggttaagcaatttgtccaagctcacacagtttgctgggggggagtgaaggttaatctttacttctctcaattcccaccctagccctctttctgctaaatgatactacatcctcaagataacttgagttgctgcatattgccgacgctaatcaaaaacagacaaatttcctcattgcatggacaaaacctgtcaaatggtactcagcagatatctcaagaccaaagctttcagagctacaaaaacaatacttttagttgtcctatcccaacaagcaacagaacaaatgttttcaaattggctctgtgaagaacatgccatgctaatacagtgtcacattgtgccagccaaggaaagattgctgggctccccttccaatcctggccacggttgatacgctttgagctgggttgcatacataaaactccctgctataagttgttgccctcatggagtttttctccagatagttctgtgattgactttgtccttcattaggtgaacacaggggctgaggaatgctaaagaggcatgatgggtaggagttcagggattttccttttcacactgtattagtcagtgttcaattaaagaagtagaatcactagagtagacagatagtgaggcagtgtgaggaagaaagaaaaaaagtacagtcagtacaccagcatctaaccatcttgggaaagattgcatagtcatgccagcatccttccccacttcctcttcccaagatccatcagaaaaacggagaaatagagtgtggacactcctttagcactactcatgttgagtgtaagcacagactcattcaggtgctaagccaacccttcagacctctacccacccacctcattttaggcaaccaaagttttaatagcctgttccaattctctatcaagctattactctgaggagggttatctgctcattgttgaatattataggctgtaaagggttttctttggtctgaagcaacgctggttggccatccaaagggatgaaatagcttctgtccagttctttaatagtattctgagcatttgtacctacctgcaagtaagaaacctgggttccaagtcagtgtctattcctgtcgtgacccacgtgcagcctctggggctatagacattagtctgatttgtcagttacaggtaaggccttcttcctggggaatctgctacatagccattctgcattctacatagcatatctgcgtcatgatactgatgcagaaaatgaaacaattccttcagattacattccctggtttcaggaaattctttgttttccccttcttccactttgtctctgtctctttggctgacaaatagaacagttctttctggcattttgtgcctcagagggtgcaaaaggacaatgtctacattcggcctgtccctgcattgatgctgtcctcctatatccatcatctcatggattcaggtggcccctttaagggtatacaccaaaggttcacctggtttttccaatcaccttccaaatctgaagaggagttcttcttatgggcactgacaagttcaactttaatgtgcccttcgaatttccatagggctgtgcacaccatatcaacatccctttaacaagccaggtttccactgccctcctgcctgatcatatggccgggacattggtcattactcatgagttgttataaacgtaaacacaggagattttaccacttcaaatcttccattactgctaggaaaccagcaagcaatttgccccactgagctgatttgtttctacctcccttcatcaatgtggcgaccttccaaacaagatgttgtctgttcaccttggaactgctgtccacaaaccagaaagctctttgttgttcagttgagagctgtttatagggcactatccaggcaacaaaaaataataaattcctcacacagttccagaatctgtcctagggaaaatgaggtgacctgcacatgagtatctccaccttgtattacccacgtagaatcatcctgcatgaaccatttccattgtattatgaaactcttctgagcactgccattcccattagagtatttctatgatgtctctgaagacatcataggtatttcaggtttcaagataatttttatgttctttagtcattgagccagtttcctttaatgtccagtagcatgttagtctctcaagcagaaattctctagttcagagtcccagtagtcatcactggcatccactcacaggcttttgccacaagcctcaggctacattccacatagagcatcacacagagagtttgttgctattagcactccagcttgaattctacactttatgggcttgggcaatctcactgggttcccatttagcatggccaattaatattgcttgaagagtagatttacatgccttctgctttacagtactaggcaggagaaacattcttcagtgagatgcaaagtccatccccataatacaatcaggtatgagagctactgtcacttcacataaagcctatttaaccataccagttctcctgcaaacttttacctgaattccatcaacccgtactgtagcttccattaggactttattagcaggtttcaattttacaatactagatcggggaagtgttccccagccagacatcatatccattcccataaagcattcagaaaaaggagacacgacttctttatagaaagcctgtttaagctttccaacttccagaatcctctcaacacttatatttttatgtcctttcaatctgatcacagcccacatcggggtttcaccaatgagttctgacaccacagtgcctgtgttcccatatcaaggagtctcagaaacttatcttctaaccatttcacccagtgcaaagcgtttgggtccctaataaagtgttaagccaagagactcttgccattttgttaatttttatttagattaatctgcctgaccattggccaaaatgattacaggccagagttttcattgtaatatttgtctttcagcttttaaaatttcttctaacatgtgtaaatagtgtgaacttatttgaatccctttaatgttggaggagcagctagggcttcctttggctcattcaacttttgggagtgttctatttaaactatagttttaacctcatcaatgtctgttttattcatcctgcttcttaataaccatccaaagattttctcactgctgggataagttttgttactctccccactcctccctgcctcattttcctctttttttttgcttctatcaatatttactgtattcatctattttttaataatcatttagccatctctaccctgctaagaccagtcccttgactcaccttagcttttccccattctctcgttaactaatctaatatttttattagcgtctgtaagacccatgagggggagctaagacagcaaattccacaagtctcctgaactgttgtttggttttggagtgatatggttatatgggatgcccatgtaaacagggaccctttaaccatggcactcagcaggacctgggttacaggcataatcagtgggtgaatagcccagctatcataaagtcagtctcacatggcttgtacacaaagcatatctgttacttcatctggggctattccatttggcatttatagaggaaggtgggcagtccccctcctcaaagtaaagagactttatagtggcctttatccagtccaccaggctagctgttcacttggaaataatctgttgtgtgtctggatcatgtacagttatgtttgatttttccacagtgagctgtggatcctgtatcaacccaaacatcctctttgaatttgcagcgtttgaagccaaagatactgcccccaaattaattactctcacatccgttttagtaaaggttctttaagaagctgatgatactgatgcagaaaatgaaacaattccttcagattacattccctggtttcaggaaattctttgttttccccttcttccactttgactgtctccttggtgaccagaggtcgaagaggtactttctgttgtccttgaataatttttcccataggaatcagctttgaggatagagtcagaagctcagatgcactggaatctgagcttggtctagcatcaaggtcctacctagcactctcttttaatttcattttaactgttacaaataacaataaccaagggatggcatattttgcctttttcatattaattttcattttccttattagtttgcttttcttacacattcagtgaaccagctttctgggagtcatatccatctctacatcccattggtagcttttacctttagtaactgagcacagcacggctgctgttccataccgtgggtgaccatgtgaccacctagaaatctaaggttccttatcctctgccctttcattctttctcttcccaaaccacatgcctctgtgagctagtgctgttctagcaaatcccacttatctgacaccaaatgcacagcaaataaataaactgtttttttcttctatacttagaccactctcattacctcacttcggacagttgaatgtttgttttttcacacacgaagcagacaccaaatgattataccaccatttaacttaattccaacactatctacctggaggtagcatcagatcccacaagttgaggggtcaaatcccacaaaaccaccattccactttttattctaattttaagtccagtctgtgaccactgcatctaacaaagtggttataaattagaggttctcatgactccctcttgaggctcaattatttgctagaatggctcacagaactcaggaaaacaatttatttattataaagtaaattaaaataattacaagtggtgtcttataaaaggatacaacccaggaacagccagatggaagagacccacaggcaaggtatgcaaaaaggggcatggaacatctgtgccctctgaggaagctgcacgctcagttctccaagtgttctacaacccggaagctctctgaactctgttgttttggatttttatggagactttattatgtagccattattgattaaaccattgccattggtgattggatcaaccatcagcccctctctccttggaggccagaagttggagctgaaagttctaaccctctaatcatatgggtgctttttctggcaaccagtccccatcttgaggctactcgggagcccacaggcaccagtcatcctgttagcatacagaaagacacttatcacatctgagatcccaaggattttaggagttatatgacaggatacaggggcaaagacccaatatatgtttcttatttttattatgccacagttgggtggataggtaagtaggcagatagatagatagagagtgagatagatcaaccaatagatatatcaattttcaaaaaagatgctgatgtctgaagacagatctgacatccttagctaagcctcaatgttattaaagactgatctgatgcttacaactatatgacacagttctctcattagacaaaaccaatctcactaaacacgtacctcagacaaggtcactgtgcaacccaaaatagcaaacagtcctctctctctttaaatgagagacttctatgttttgccatttgtagctttattcctacttatccccacttatagataagatttattaaaatattcaatcacaaaattacctctactttctgataacgtccaatctagagcaaacctctgttttcttagaacctccccaaaattactcaaccaaagctcaaatactataacagctttttctaatcccctcttactgagatacccaacatttccccatggtgtacgattgcctttgctgcactgaagatacctgaagttgaacaagttgtgaacaagttgggtttaccatatataccatagatatatatatatatatatatctatggtatatataccataaaatatatatatatttttaatatatgtatatatatgtgtatatatgggtgtatatataaataaaatatgcatatatatgtatgtacatccacatatatgcatatatacatagatttatataaatatatgttcacatacatgtaaatatatatgcttatatataatatatacatatatacctacacatgcacacacacttacacacatatattggctttatttttattacagggatttaaccttacacaaattgtgaaaattgcttaaacagtctcttgtcacgatgttatctgctaatacaatgctggatcttgaagtgcacagggcaagaagttggaaaaggaaagatgaatgtaaaccgggtaaaagcaagaacaagctgtatccctggagacagcaatatggactcatgtttagctaaacatagatacagatggttacatatagaaatatttatagatatgtctgtatacactggttagtatacacacaaatatcttctggcccaaacagctgagagggccaacaagtaaagaaactcctgtagcaataagcatacctgggtgtctagattgtggtttctaatatcattttttaataaaaggaaacaaaactactgggaaaatggctgattctagaagtgaaatgagaaatatatgagatgagcctacaacatcttgtagtgccggaaagtaagaaagtgctcaaaaacaaaccaaccactatgatagggatgtcagagagataggagccaactgaaagggctcctaatggccaatattagaacaatttaagcaacaaaatgaagtagtataggattataaccctaataagaacataaatattcatgagtttatattgacacaagtaaatgattgaacaaaagaaataagtaaatggggcagaatagacaaatctctcatgcagaagaattctgaataatagaaatagatattctgcccttaagaaggtagagcataatttcccattcataaatgtgagctgactgtaaggggctttcttccaaagagtgctgtatggaaagaggaagaaaaaagagttacttcacaatggggaaacctgaccaacactacctcaaaccaggtgatcaaagttagcatcaacagtgattaatcatattgatagtaagtaccttgataagatatgaaaatatggcagtttactttggtgttcttcctcccaaaaacatattatcgcagtgtaactaggaaagagaaagataatcagacaaatcacaacagagggacattctacaagatacatgaccagtaattttcaaagctgtcaaagtcatcaaaaacaacggaagtctgtgaaactgtgacaaccaagaggagcctaaggaggtgggactattatgtgtaatttggtaattctagatgagactctaaaacaaaaagaaaatactggaaaaaaattaaagaaaaagtatgaactttataatataatgtacaaatatttattacttataaccaatatatcatactaatataagatgttaataataggcataaataggtatggggcatatgaaaaccctatcttcacaataatgttgtaaatctaaaactgttctataataaaaggcttatttaaaaaactaaatgaccagttggaactcataagtattaactaggctgagaaagatggactatgacttgtgtcagttcttgtttcccttgaccttgatggcatgggtgtcctgcagaagctagggcccttccccttggagctaaacacccacacctggcacaagagtcagagaatctgaaggaggatcctagggaagaaggaactattgcacgccctttctcggctctgtgcccatgaagtgggtcagtaggtaactggcgtgtatgagcttccacagggctgctgcttcacctctacacttcaaatctcacacaagaatctgcagttaacccatgcaaaaggaaaagagaagtgaaattgtagaaaatgtggttcagcatagccaagctggcacataacaaatccaccacacaattgcacatagacattgttcaatagggcagcgatgtcacaatataaactaaacacacaaccccgagaaggatagagcagacttaaatgcatattaaagtatttattataaattttcattgtttctttggaatagattttgatagaaagaggatagccagagacaatgcgaatttaatagtgtccctgatggaaaatagaaagaaagcagagaagagaactaatagatggacatgagagaaaacagactttggctcaatgccaagattcagcattaatctaaaagaatattttttcttctcctgtataaaaatgcttatattaacctaataaatattgatatattgatattattatttgttagagctctcattcaagaatggctatcatgctaaatagttgacataaaatgtaatggtcacctggctagtttccaaaagcaattcagaactaggaatgtattaatatgattcaatcaacacaattgctttatcttaattttacatcttaactcaaaaatttaaaagctggcctaaagtcatttcctggctaccttctttgtcattgggaccataggggtttattgactctttaagctgtgattttctcaggactgagacagtctctcaactcgactgtacaatttttgcaataagaaatcacacacaatatgtcttaatccaatctctctatctccaacaatttgcaaagtgtccagcacataacagggtccaataaatatttgttaaacaagctatttaatggtgtgggtaaacttgcaaataaaaaattaagattatactagcaggatggtttattaataggttatgagctttggagtcaggcaactctgccacttgagccttgggctggttatttaacatctaaaataaaaatacatataatccatgcactgatgattcacagttttatgtttttagccctgaactacagttctgtatatccagttgtctgcttgacattttcatttggacatctagtagacttggcagactcaacatatccaagaataagctccacatgagttcatcccctataaatacaggcttttatggacagttccatgtttattaagtctaactccattcttctagttacttatgcctaacatttgatgtcatatctaatccctcatttactatcaactctagaactagttcatcagcaaattttgttttctctgttttcaaaatgcttacaatgtgaccactttccactgtccctactactgtcattctggtatcagccactatcttgacatgattatgccaatagggtcttcctggtctccctactcctgtcattgctgtcttgcggtgtgtcctcaaaccagcagccagagttatttcattaaaaacataagtcaagcttatgtttctactgggagtcaaagtcaaattcttcactgagctacaatgccctataaagtctgtatccccaacccttcattatcttctacaagtttgtcccttatactctcagtccagccacactgaccttcttaggattcagttttacttgcaacaaactaggtataatgataataatgcctaacctagatcttattcaatgtattaaatgagaaaatatgtatatgaagagtttagcacagagcctggcttctgggaagcagtaatatgagtgaatagtggctgttattatttttgaagctgttatcatcatcaccactattattgtttcccaaggaagcagcctttgaagacagtatacttgccttgattattgacctcttcaacgatgcgactcaaaatcacttttaactgcttcccccaagtaaaatttgtagaaaaatttgcttcagaccctggagggacttccaacatgcaacttcaaaattatctgggtttcaggaacaacacttgcaaaacacgatttggttgggtaaacagtcaattaatcatataagttctagtaatttttttaatcagctgtattactgtagtcattctttatacaacggaaagtataatgcattttgattcaaatttgattaatatcctgaacatcagcaataaatacaatttaaatttaggttatgcttttgtttcctttctgagacatttttcaaagatgggagcaagtggaagtttttattactgttattgttgctgtttatttgttcacttgtttctcagcttatctttgtgtccaggtttcagaacatagaaagaattctgacaccagtttatcctgctgcctaatggtaaacttgggaatcagagtttttttttaaatacttctaccattaatttgcttaaaatcaggacgcaaattcatgtctctatgtcttatggtagaattccaaaccttgtgagatgttgggaaatttcaagtaatatagtttaaagttataaaaatctttagcaatttgtggcactctattataattgacaggttacttatctcttttccttcttatattttaattaatagaagctcaatatatgtctattgaatgttgactgaattgaatgaggctacattaaacagaattcataatactttactcagaaatgtatcactgtaaataagattagaaggcagaaaactttggatctcttgtaattcataatccaactttgaatttctagactttgtttatgttagtaataagatgtaatgacctcccagggtacagcctccctatatactgcctcactgatccgttctagagagtgcaggtcctgtgcaatgtaactctcaacttgcctactcttgtagcatgcacatacacactctacctcatagacatccatacactcacacactcacacagccatattcaagactattatcagcaaaagaacttcaccctttacaaaacgcattcaagatctgagttttcacatggaagtgaaacatggaagttttaaaattataaaatgcatgtaggcatcagccatgtttacaagtgtcaaaacattttttttttccttttttcctttaagatagagcctcactctgttgaccaggcgggaatgtagtggcatgatcatggtttgctgaaggtttgacctccttgggttcaggtgatcctcccacctcagactcctgagtagttgtgacaaaggaggacgaatgcaggaataaggacaaagacaaaagagtatatttgcaataagaagtcaggggggtccttgcttctagtgaatgagggcccgagcctttatagcccttcgcatttttgagtaaaggagatagggagaagggggtattctggtcagctgcttgacttaatgcaggcctgcatgacttcattctttgaacagtagtctccaggtgttcctcaaggagaacagtgccagggagtgactgcccccagcaaaccttctggcaacaggcacagaagcgagtttgctcacattctgcgctcatgataaacagtttgctgtttgatcatatagccttcagtggaatgccgtgttagtcacaactctcaggccttcggctccctacagcatgccaccaagcctggctaatttttggatttttattagagatggagtttcaccatgttgcccaagccggtcttgaactcctgggtttaggcgatccacctgcctcagcctcccaaagcattagaattacaggagtgagctactgcacccagcctcaaaaaaatttttaaaaggtttaattttctctaattgcctgccaatattcaatgttggatttcccttccctcttgtttaaaagcatattgatatagtcctcaattttccagtaatttggggtattaaatattcagcctagtttgaaacctcaattgtaaaatctattttattcttatatcagcttccactcaccagcttccaaactggacctacgatgctggcttcctagagtggaataatgtgatggtctgccctaaatatcaaaggtgcttgtcatccttcttcagtaggaaagagtggtattagatggatacagggttcttcttatgaaactggtagtatgtccatggcaaggagggtcttcttgttttgtgattctcattaagtagggtttagcctcacccttgctccctccatcattgggggtccatcaggagggatgctatatctctccctcactaataatcctttgggctagacatcctctatcttgcctaatgattccctgggcagagcagtgtacctatacatggagtcacacaaactgctcaggttcttttccttggcctacaatgaccgagactttgaaagagaaagagttttgctcatatattcttcccaggaacaattatccatgaacccttttctctgtgttattcattaagcttctcaccttcagaaacctcaagtcaaaaataaacaattagggaacggttctcacatgtcccctaattacaaagaattttcatgccaattactttttgtattaataacccatctctccccctgagaaatgtaagcttcaagagggcagggatttgtttatttcatatttgattgatgtatccaccatttctagaacagtgagtatagactgaatgaatgaatcttttctcctagataatatataggtcccatataattttaatatttattattgtgttcatgttacacatggagaatatcaagaaactcccttggtttggaggtaatggagaactgtccaatggtcatatgtactatatcacagaaaatgccaaaggcttgcaaggctgaaaaagaaagaaaaacataaagaaatacaattgcaataaagtataaacaaaattgctttggcaacctgcacataccaatattttttctggtaaatattccacagctacccacttattagcattggatgccagattttagggtgatgtaatggattgaagtagggataagattatcaaatgttgcgatggatgaagttggttttgcagcttttaatagcctttgatgaaagagattccatttaagtagggtgaaatgtgtcattctctcagttttgactattggttctttaaattatgtacaccccaccaagtttttgtaaaaccatctagctacctgcaatgactctgggaagcagaaagactgaagaagaatctttaagctcatcacagcctttatgtcttgcctcgggtttcaccacaaggaactcttgcgttttagagtaacttcctggctccagtgcttggaagcagatgggggctaacagtgccacattggtgggactcctcctaaactggaacctctatgggccttgatggttccagttttccccaatgagggcactttccaaccaaaccttctctattgacccgtacgctgtatttgttctctatcacgttgtaacaaattaccctaaacttagcatcttaaaacagtgcgcatttgccatttcacagttctgtagatcagaagtctaagtgagctcagctggtcctctgcttagggtctcagaatattgaaatcagtgtcaggctaggctacgtcccttattggacactgtggaagaatcaattcattcaggttgtcggtataatctagtggctttcaattgtgctactgaggaccccatttttgtattacttgtcatttagggctgacccttgctcctagaggctacccacattcctcttcatgctttccatgtagcctccctccagccacagtgggtcaggtcccttctaaccttcatcaatcatcacttcagttctctctaacttccccttctgtctttgtgactccataaagttttctgtttttaaaggcacacgtgatcaggttgtgttcacctaaatactccaggttaatctatctattttaacatctataatcgtaattacatctgcaaagcctctttggtcatggaatgtaatatcctcacagatttcaggaataagagtggaaacattgggaagagggcattctgcctaccatacctctttctagtaggatctaccagatgccctggggatctcttggatttccatagatggaattgtcctggggttctgcaaatggcttcagtgcatgagggcagcataacaagcagattgcttccactgggcagcatggcatttcttttgtgtgattgcatgagatcgagccatcagaatggttggtgatatgctgattttgagtgactttctgacactagatgaggtcagggctttggactactgatggtccaccatgaggcattgttagaaataacagcattgctcccagctactcaggagactgaggcaggagaatggcatgaacctgggaggtggagcttgcagtaagccgagattgcgccactgcactccagcctgggagacagagcaagactctgtctcaaaaaaaaaaaaaaaaaaagaaataacagcattgctactttcttctcacaataggaatagaaaagtaggcaaaatgggacatgtgataagaaagaactcaaagatatagcttctggacctgaaaaagaagaaatgtgatgcctggatactgtgaagaatctatacatgtactaatcatacaattgcaaatacctaactttttctctatccattattctaaatcttcaccacttaatcactgtgtattatatggaccaattaatcttgtaatacattgctaacaaataaaattatttatatagacaataacccgcagaaaattgttcagtgtctgtacaccctaggggtgtccctgcttatattagtaacatataataagcatgacatacaaataattgtgtctcccactataccataaatatttgctttatgatgcaaagatttcatagccctttttatgtgtgtttcataatagtacaagaagtggatgtatcagaatgtatttagtaaatttcctaataattgacactttctttagtagtgaattcatttcagtttgaccttttagttttctcttcattattttggtttgtcttttaagttggtgggttttttttttttaatttgtcttttaacttttcctactccttttctttgtcgatgaatgactttgttatttataattattttgttttagcttttgtcttcattctgtatacttaagcttatcttacataagattcattgacagactgatccttctcggatatccagaaggaaagtaatacttctctcctattagacatccatttttgccttttcccccctgcttttagcaccaaattatataggttttacctctttcaagttttaaaacctttgataaattaatttttgttattactgtagtttaatctgtattttattccattgatcatattgtcatttcttgcctttaaaccactgatgtccaataaaccttttctaacctttgactataggaaattcccattcatttttgaaactgttcagatatgggttcttctaagaggccttctctgtgctttctctgaagcagaatcttttcctccattgtctgtgatgcctctggttgaaagacatctcttgcatttctttgtgtcaatctctagactgagcttctaagtgaaggaggctggtcttgtgggttagtcatatctacaacacttggcacaactaatagtagtttatggatggtcaatgaatgccttcctctgcaactgtcccacagaataaaaaagaaacttacatctatattctatcttagatgatttatttttcattttatttaatatttccattttgattataaaatattttaatcacacacaaaagtacagaaaatgttaaaatcaataaagtacctacctatgagattagagagttagccctatttgattttcacatattcataaatacaagtgaagtttcactctctcaggcccctctccttcctttctcttttttaggggctaatgtcccaaagtcagagtgtatcattctcatgcatgttctttaacatttaaggtatatgtttgaatatatgaacagcatataccactgcgtgtattacaaatatctcatacattaaattaaataggaaaaaagtagtaattttttaccactgccttccatttatagacctatgttttaacatgtctggacaaaggaaaaaaaatccttcactcctttaatcttagtagctacatgtaaatttctgacatcataaatacatttttgcttatttattgttttaaccaaggttgtccagagaaacaggaaaaaatagaatattaatatttatagaaagagatttattacaggaaattggctcacacaattatggaggctgggaagcccaaaacctggagggtggacagataggctgaagacacagaagagtcagtgttccaatttgagtctaagggccatcttctatagaactgagaagagcttatgctgttgatgaagtgcagaggcaatctgctggagaagtctctcttcctcagggaagggcattcattttgttcttttcaagccttcaactgactggatgaggcctacccacattatagagaacatatactttacttgaagaccactaatttaaatattaatcttatctaaaagcatccttgcagaaacacagagaataatggttgaccaatatctaggttcctggtgacccacgaatttgacatacaagattaccatcacatttccctaaatctatttccttgctttcaggtaaaagtctttgaacactcttcttgtattcaggagataagtgtatggctgaaacatacttcccataatatttccttttttttttttttttgagacagtcttgctcagtcgcccaagctggagtgcagtggcacgatctcggctcaccacaagctctgcctcccagtttcatgccattctcctgcctcagcctcccgagtagctgggactacaggtgcccgccaccacacccggctaatttttgtttgtatttttagtagagatgaggtttcaccatgttagccaggatggtctcgatctcctgacctcgtaatccacccgcctcggcctcccaaagtgctgggattataggcatgagccaccgcgcccggcccccataacatttcttttggaagacagtcacagcccagatgtgataattattgtaaccttaattatattcatgacaccattcccaatctcatatttctccatgtaccttacgtgttatgcaccaatccgtcccaacatgcctttcttcatttgactaatatgaaggactgaaactcagttctttcacatgaaataattattcctcctcaaattgatctttgtttcttctgtgaatgttcctcttggttctttcctttcaatgcctcttgagctaaagccctggccctctacatccttgtaatctatgccattccttcctaattgaagttatacttaacccagtttgtgatattttaattaatccttcaagccttcttcaagcaaacatcctcacttgaagttttacttcacttatatttataagaatttaattagccctccaaggctgcttcttttgaacttcctctttgactccactactttggctgccatttttcttagattttaagatgccctctattgtaagatgcattgttgattaataacaacttttcttttttatgtggaagagttggcagttctgaatcaaaagtacctattgtctttcataaaacatactaactgccagaggatatttattcatataattgtatagcactttctttttcactgtcacaatcaaaatttgaattaaaatcttctcctcagccagagtctaaagagacttcttattttcttaaagcccctggattttaggcatagcatcatagtaacaagttattattcataactggtgctcatgtgaatttagaaacttccttcccctcatcttcttctgtatgtattttaatcatgcctgattttggtgtgtttacaatataatctacagtaaataatatgaggagctttatttttttcctatgctctagaattgtttcatcataaaaatctatggttccttgtaggcctgatagaaatgcacctatgaaactgtaagtaaagtgatatttagaagtagaaatttccaggggagtttttggttattgatttaatcaaatattttgagtaattttgtttagttatgatttctttatattgactatttaatctagatatctaaatttgtctgtgtaaagtgacaaaagcatcattttatagccgtattgccagacaagcacttcattttattttccacatttatttttgttttcttgcctacagtattaaaggcttcttcccctttataaatcccttccttcttttctctgtcatgttccctcttcacctatcttactgtattgaatacttagtttattatttctttttgtttgctaatacagtagaaaatattggcaacatttcacgcacacacacacacatatacacacacacacatacacatcatccatcagaatgggactgctgaatcgaagattatattaagactgatacatattcctggaaataacaggaacaaatattagaaagctaatgagcttttttattattccaattggctataactagaggagataagaaaccaatcatgctacagaatagtagagaacccgctgactcctaaaaacctgagtagcttttgttcaataaacaaaacactatttcctcagtataggtgtaagatgtatgatgcctaaaaaaatcttgcacattgattagcgaccatgttagtctctacacatctccaaaatgggtgcaggtggggtgacaggcatcactattcaccccacaaagtctaaaatgctctgctaaactgtaagattccattgcatggaggtaagaagaagggcatgagaaatttatgaactttatcttaaagaaatgaagttattctgtaggaaaggcatgaagtttgatcaaaaaagaggtgaataagtgagtgcctccagcttcaccttcagagcctgggttaggagtagagtttactgaaagaatgccctcctccaaactctgttttcctattgaagaaaaataattctagttatctttcctttcatacttagataatacctccagcaattgatgtgtgtgttagtattggctccttggagctaagagtttcttaagggctatcatactgaggctgaatcttgaaaaactagcaaggtttattaacgtgagtgagaaagaaaaaaatatgagaagaggaaaaggtaagaacagaagtgttctcatctataagaacgaaaacgttgtcacctaatctgaattcaaattcaactgagagaaagacttggagagaggcagatgaagataaaaatatcagctttattcctgatgaaaattatactgcaatacatgatgtaaatgtatggccatgactactttctgataatttcctgtagtagacaactttttgtttgtttgtttgtttgtttgttttttgataccgagtcttgctctgtcacccaggctggagtgcagtggtgtgatttcggctcactgcagcctccacctcccaggttcaagctaccctcatgcctgagcctcctgagtagctgggattacaggcgcccaccaccaagcctggctaatttttctatttttagtagagactgggtttcaccatgttggccaggctggtcttaaactccagacctcacatgatctgcctgcctcagcctctcaaagtgctgggattacaggtgtgagccaccgcgcccggccagtagacaacttctgatgtggctcctggtgatgcttgatactctagtacactcctagtattcacttttatgaatcccctgttcttgagtacagacaggacctagtgacttgccaacaataaacagaatacagaaagagttataggatgtcacttccaagattggattatcaagaagctttgtcttccattttgcttgcactctctctttctctttctggttcttctcagcttgctcgctctgatgaacaagctgccctgttgagtgctgccctctggagtgccctgcatggaaagaacctgtgggtggcctctgaaaaacagccacatgagtgggcttgagagtcaatcctttctgaatcaagccttgtgatcactgcagctttgaacaacatctagatttcggccttaagagaccacaaagcacaggatatgccatataaatcaaatcaggattggtgacccataaagctgtgagctaataaatgttttaagtcaataacttttagggtaatttgttatgcagcaataggtaactaataaacctctcctagagaacgcactctcctcccccaaaataagatgcatgtattgaagagaaaatccctatgtccaaaacgagattaggtctatagcagcatgaaaaccagaagatgctaaccaacacattcctccttcaatttcaaaaattcaccagttagataaatacttcttcttcccttgggagtgttattcaaggagcagaattatgcaaacatgaccctgtgttgcttagacaacaaactaggttaaggtctgtgagctcactttcctcctagctgaaggggcagccttcgagtttaagtttccatgggactgagaccatctttcttgtggtcaaggagactgcatcatcccaagttccaagtaaaaagacgtcaagttccaagtacaaagctgtcttgtccaggcaatattgcaaattgcaagtactgcaaatacagactgctcagtggcaagtattctgttcatttcttcactgaaaaggccattttctcttgcttattctataagaaggagcaccaatggagtgggaagacgagttcccccaccagagcaggacccatgctaggtttagtagatgtccacatctagattttcagctacagtgctcacaaggcttgattcagaaaggattgactctcaagctcactcacgtggctgttattccttggaataactgagagcttgagaactgcatatggctctgtctttttgtctctggctcggggtttccttttttccaatatagtttgctttataatctatgctctattttaagttgtggacttcattccgaccacttggaccttctttcccccagaaaaacacagacaaataagtgagatcctaaagatccatccgaggtatttattctgtatttttccctccatcaagagtggaaatgtatggagagagagttaactattgctcctcacccttgcacacatgcatgtgtgcatgcacatgcatacacatgcaccaatgaagggtagagaaatacaaaaagataggacagatttgggatatacaagtaggtctgtattgcaagacaaataggtaagttgacagtcacggtgtattgaagtaccagaatgccacatccatagggccatcctgttgcacaacttcacgctgcccaacccagtaaggagtggttccccctgtagtcgtggaatgcagtggtcttagcagagcccttagatgaccccagtcactatatatcttcttctctccttgatctttcttattttagagatgacagttttacaggcataagcaaaaaaaaaaaaaaaaaaaaaaaatcagtccaaaacctgccaccaaggcacagaattgcctcttaccttccttttgtttttgtggggctgcccaaaataagtagcaggatgattcatcgtagcctctggaagttgtctgacagaactctattccggtgtgtgactgaagctacttatagcttgtgtcattttctgcaataactcagttccaagcaaagattaatgcagttagagcattttgcagaaatagtaaaccacccttgcaactgattgcgattctagagcttccttgcctgtgagttattcatgtagctctccagcgttgttttcataaacagatattgtttcattggttgctaatcacttctgccaaagttagagtaggctcaaggccaggggaaatagggaggttttattcaaagaagcaaagttttcaaggtataaaaaatgccaaactactcactgttccagacttttcttatactaatgaacactgaatgtatgtttaagaaaaatttgtattcaaagtttgtgtatgatatctcatctgatcatgcttttttttgtaatcaacccactgaattatttaatttttcacaagttactttttcactatattcactgggttggcaatgatatttttctgtgtcaaaataaatgacagtcatgaaagtaaataccgtaagatttaccagaaagactaatctatcattgcttcttttattacttattctcagaagataacattgctagaaaaaataactttaagtgaacaacattataactaatggcttgctgtttgtttgcttgtttgtttttaatcattaaaagttttctgggctgtgatggtgcatcagaccagaagctaccagaagcacagagaccctagaaaagtgcgtagcatatggtagagactccataggactactgaacagtagagcaaccgtctagcaggactacacgtctttcttgggcttttcagtgatccttatttgtatgtgagaaacattacttaatggtaatatataaagaagtcatttcagttgaggccctcactgctctcactcttgaaccaggactattttgaattccagcttacttattagattcaatgctctcaagaaaatttatagtttaagtgttcaaccaatctctgaaatacagttgagagaaatcatccttggaaataacaacctaaaagttaactgcatcagacaccctttcctgctgggttttgcacaggcaagatattcatgtgtcattcctggtcagatgaaatgtctctagcatctccttccttcacttatgtgtaaagaggcttggtggttaattttctaatttagcagatgcaaaagtagaaatgtgaaggaaaaggagcttcctcaggtgaacttcagggaaaagacctcagaaaaaatatttagctccatgttataactttgctcacatcattttcttcattcagagtcactgcaattatgcccatcaatcattatgggtgaaatcagcaatctttaagtttacttccattgctaacattcaattttctctcccaaaagttagttacttttctcttttattcttttcctcatagttacagagattaacgaatatgtttcattcatattttgtgtcaagcggggcctagaagagtgaacaaggctgagacatctcatagtgggttcagtaggcttaagaaagtaaagttcttccttttggttatggattctcaatttaagcccaagtagcattaacgttgtcaaagtttacctggtaaaacacaaattttcttgccaaggcaaacagtcagtctgaaaattgtaggaaccaacgtatagggtccagatattagaaaagcttagagacagatgtggtcaagcatgcacatgaaaagtcacctggaataattctagaagtaagtcagacatttccaaagggtttctgtgtggtaatttattagattccattggtttgttggactcatttaaaggatatactataaaacagataaatctgttcatattgtcatatcacttatactttataatcatttttatttgacgtatctaatagaggaagagtaatgcagtctttaatattatttcagtctttttttcttaatgtggaacagtaacaatggaacagaatcacccttgacaattgctaaggcagaatgacttttaagtggcttctctacttatagcactgagaataatccactgctccaatattacctccacccaaccatcatcaataagctaatgcacttattgcataaagtctaaacaaccttacaatttctagcagcagtgtcaaaaagaactttctgtaatgccaaaaacattccctatatatatgtgtactgttcaatagatgactattaggcacttgaaatgtggttagtgcaactaaagaaatcagttttaaatttttgtttaatttcagttaatttaaatgtaaacagcaatttatgactactggctaccatattggacagtgacagttttatagtttcagcatcttgtctcttacctctttacagagacttttgaattatttgagccaaacaaggtatgtttcaggccacctcatcattatgctggcttattaactcaattagaatatcagaccataatggctttatttcacttttgattcttatttgaaaaatatctacattatacccataaacaaacacacacacacacacacacacccctacacacacacacacacctacacacacacacacctccatcttatttcccaaaccgtgcacataaaaacacaggcttagtgcttaatgtaaaaaaaaaaaaaaagcataaacttcaaagatgtttcatggtacctaggcaggtagagcttttcttcctgtttcattgtgaccaacattattacagtcaggaacaacttttattcagaaaacttatcttctaaaatagctataaatactagaaaagcatatgagaaattgagcttgtgaggaaagctacagaagaaaaagtaagaaaggctttggaaaaatatgcattatggtttcttgtgcatgcggctatagagagacatctcaactaaggtaatttgtatatttgtaagagtcataagtgactggattccagtcccagttctaccacttactaggtgtaatgacactggccatgttaatgaacctctctgagtctgagattccttatccatcaaacaagatgatttctgacacttaaaatcttcgtggatattaaataagacaatatgtgcaaataacttaatatttattctattactagaatactagtatactaaagtatactaacagtagactttaaatatgttaattccttttctttctatttttaaggcaaatgttttgaaacatatgaaaactaattgaagccatatactccagaaatatgcaatcaataagacacttctgtgaaatgagttcactgtgactttgttagtaggttctatgaaactagggtatctccagaccctaggcagatggtcacattttgagggggaataaagcatctttatcagaaaattctttttggttggttccttcattatgactcggaaaaatgccatttaaacagatggatatgaatacaggcaaccagagaggctgcacttgtacccctagtcttggcatgtggcaccagattccctcaccaggctgtcaaaacagctgctgtgcactttcccccacctgcagttacaaagctctgccaagagtatcccagcttagagaagaacctgtatagttcattctcctgggttggaggccacacttactgcctttggagcactaggggcgccttttcacatctttctttaaaatcctgggaatgaaaaagatatgtaacctttccagttcatctatcctttcattaacattgaagtgacagcaagtcttggtagaaaaaatgggatatatattcaaaactccacttgaccattcacttgtagttaaataaagttactttaacagctttgatccttagttacatcttttccaagtggaaataaacaatatttgataaaattgtagtggtagttaggaataatgatgaaagagagtctagatagttgtggtggtcatggtagtactaagagttgcaatggcaacatgtaacatttatttactgtttgttatacatcaagtatggttctacatgctttacaagtattaggcatttaacccttatagtcattgcataaacatatgtattttgtaagatagttgaagataatgaggcagaatgaatttaacttgctcaagattacagagctagaaaggtatgaagtggtaaataaaactcaggaagtctgactccagagcctgcatacttacgaattactataggtgttaagggaatggtaactatttttatggggaagcaaagatccacagaaaattgagtatgttaatgaaatctccattgatgaaaagcaaatgacagctataaggcctgtgaatgatttctatctggtacttcttgcttaggtaggaaaaatttgctgaggaaaggataattcaaaatcactcctttttatgggaacacagaaatagtgttacagaagtcacgtcgttacatgagtattataaagtagcagtataatttaagtaattaagcaaatcctgaaataattgtttttatattttaattgctgacagaatatatttagttaatggattttatattctttaatttacatttgatattaattatagtctatatttatgtgtagttttacacacagcacattaaacacagcttgatctgatgaaattgattttatcatatctggcaaaaattaaccatttgtggaaaccagattggtctcacttgtatgtttgaaaccttttgtaccaagtagtttctgtttttgcttctaagtgtcgcagatctaaggaaaagaatatcaattcaacactacaacaaagttaaaaagtagattcatttggattcaatttaagcttatagaaataaaaagccttcagtgtgcttactttgaactgaatatttagaacatgagatcaaatgctctgtattataaaggcaacaagtcctcaaatatatgctttggttcatataaagtctgtaatgaaaagagatgtcagggaagtggagacaggttgagatagaaacacatacaattaggcaaagagatattaagaaataaagaaaagggaacaggtaaaagaaagaagatggaaaagatggaagatggaaaagaaacaaaagggagagagacctcggccttgctaaattctgttcccaatttctttagttcatctctgcttggattctctcttcctatgccacagcccagaaagtacactgaggcagaaacctggggcaatattagggccacttaatatgatttccttctctcatagatcttaatcttgtcacctgacatgtgaatatagttggatcataccctttacagagtcttagagctatttactttgaggggcatggcagactgaataataactctctgaagatactaacatgtgaacaaccagaacccttaaatacatcaccttataccggaaaataaattgcacatataaataaatcaagggtcttgatatggggagattatcctggattatctggttgagcccaatgtaatcacaggatctttatgagagagaaggaaggtcagagtcagagagaggaagacgtgaaaacttctaaagaaaatttaggaaaaatattttgtggcatttggttagatttcttagctgcaacaccaaaagcgtaattcataatagaaatacatcataaattgaacttcttcaaaattaaaaatttctgctcttcaaaagacgtgaagagaattaaaacacaaaacagggcaggagggaatatttgcaaatcacatatctgatatgattccatttacataatattttgtaaaagacagaactatagggacagaaacgaatttagttgctgctggatgcttgaactggagagagctgactacaatctccttcataggttgactgtggcatttgttacactactgtatgcatttaccaaaactcacagaactttacaccaaatgtggtgaattctactatatttaaattataatacaattgtatttgtcagagggacaggactaataggatagatgcatatatgaaagggagtttattaaggagtattgattcacaggatcacaaggtgaagtcccacaatagatcatctgcaagctgaggagcaagggagccagtccgagtcctaaaaccttaaaagtggggaagctgacaatgcagccttcagtctgtggccaaaggccagagagaacctggcaaaccactggtgtaggtccaagagtccaaaagctgaagagcttagagtctggtgtttgagggcaggaagcatctagcacaggagaagcatgaaggccagaagactcagcaagtctagtccttccatgttcctctgcctgcttttatcctagctgtgttggcagctgattagatggtgcccgcctgaattaagggtgggtctgcctctccagtccactgactcaaattttaatctcctttggcaacaacctcacagacacacccaggaacaatactttgcatccttaaatcaatcatgttgacactcattaactatcacgccaataaatccaagttaaaaagaaattctcaattgaactacgggggtatacaggtatacacgggatatgaactacaggggtatacacagaatgaaatcctgtcatttggtgtacaaattctactagggaaggccgacaataacaagtaagcatataaatatataatataatttcatttgactaattgatataatgttacttggccaagtcatttatattaatgagtacaataagaaacaaacagagaaagataaaacagtgtgctttccaaacttattcatgcaatgacaaacaataaataatacttaacatttaaagagcacattgagttaagcaggctaaggccgtttgtggtcagggagaactggtggtgggcggagaataagagggtacagtagccctaggccttgccttgccattctaaggagcaggggatcaaggcttggtaattaatggctcatagactggaacattctggggtaagggaatggattaggggatgacttctggtttagcaaagagagactggtgaaatgtctggagacataacattgaatagagacctagataaagggggccagccctggaaaaatctgggggatgattgatctagacaaaagaagaacaatcacaaggaacttgtttttcatagaggaatgagtttggcaagttagagaaaaagcaaggactacatagcagagagtaatgggaagtacagtggaggttagaaggtaaggtcagacaggtggtcacagccaagtcattcagtcttagagtcagtggtaagatacttgggactgatttacatgtaatatgaagccattagagggttttgagctggagagttatgtgattttatttatagttttacaagatcaatatgatttttggtttaatactgtttttaaggggttagtaaaaacaaagagattagtaaagtggctactatattagtcgagatgaaagataagaaaggcttagcttagtgtgttacctgaaaaatgggtgaaaactgtgatacaggagttaaaaagaaattacttaggcagatagagagggtacggaaatcctcggtaatgattttccttttaataaaaagcagcccaaaatcattttcctttctaacaaagagcagcctgtaaaattgagctgcagacatagttgccagaagaggaatactacctgtgaccaggcatgttcaaaatggcggctccatcttcccttccctttgccagccacatgtacagcaaggagtggacaagatggtgttggtcaactggaagcccatttgaataataagattagggtggagtggccagccttccccagactgtgtcaacgtcacacctgattgaaccaatctgtgtgtcctacataaatcagacactgcctcctcaagccagccttttcctctgggaagcccctctctctcactagagagagagctgttttcctttctttttctttctctttcttttgcctattaaacctcccatcctaaactccttgtgtgtgtttctgtcctaaattttcgtggagcaagatgaccaaccctgggtatttaccccagacaagaatgccacttcaactggtcagattagaaaaataatctaaaggtagagtttaaatcagaatgtgatttatttacggatgtgagaagggaaatggtattaaatgttttctagattattggtctgaaaaactaagtggatggtgatactacttagtaaatggagaaaattgggagaaaacatcttggaaggtgttttcaaatatgttaattggacacgcctgctagaaaccatgaggtagaattacggagtgtggtaatgcaaggagaattcaagatatgcaaatcaataaatgtgataaatcactttacagaggaaaggacaaaacgtgtattagtatttcagtagatgcagaaaaatcacttgacaaatctcaatattccaacatgattaaaaactatcaacaaatcaggtatagaagaaagtagattaacacaataaaggtcatatatgacaaacccacagctaatatcatactgaatggagaaaacttgaaagcttttccctgagatctaaaaaaagacaaggattatctctttcattatttctattcaataaagccctggaagtcttagccagagcaagtaggcaaaataaagaaataaaagtcatccaaatgggaaaggatgaagttaaattgtctctgtttgatgatgatgtaaccatatatatattttttaaaactaccaaaaaactgtcagaaataataaacaaacagtacagttgcaggatacaaaattagtgtatgcaaatcagtaacatttctatacactagtagcaaactatctgaaaaaaaatcaagaaacaactctatttacaaagttatttaaaaaataaaataagaataaatataaacaaagaggtaaaagacctctacactgaaaactataaaacatggatgcaagaaaccaaaaaagacacaaataaataaaaagatatcccatattgatggatggaaagaattaatatagttaacatgtcaatactacccaaagtgatctacagattcaatgcaatcttcatcgaactaccaatgacattcttcacagaaacatataaaagcaattctaaattttgtatcaaaccataaaagactcccaaaagcaaaagcaatcttgagcaaaaagaacaaagttggaggaatcatgctatctaatttgaagacaaactacaaagctatagtaaccaaaatacatagtactagcataaaaacagactcatagacaaatggaagagaataaaaagcccagaaatactccccatttatagccaatttttttcaatagaggcaccaagaacatacagtggagaaaagacagtttcttcaataaatgatattggaaaactggatatccacatacagaagaatgacattagaccattatatctcaccacatacaaaaatcaattaaaattgattagacttaagtgtaagacctgaaagtataaaacttctagaagaaaacataggagaaaatcttgtcgatataggtttaggctaaaaattttggatacgacctcaaaagcaccagcaacggaaacaaaaatagacaaatgagattacatcaaactagaaagcttctgcacagcaaaagaaacaatcaacagagtgaagaacaacctacagaatgagagaaaacaattgcacaccatacactggataaggaactaacataaaaattatatcagaaactcaaattgctcaataacaagaaaactactgtatttaaaaatgggcaaaaaacttgaataggtgtttctcaaaagaagacataggaggaccaacagattgcatacataatgttcaacatctcaaatcatcagagaaacacaaagtaagaccacaaagatgaaagacaaaaagtgttggtgaggatgtagagaaaagggaacacttaacacattgttggtgggaatgtaaattagtagagccatttggaaaattatgaagattcaatcagagaataaaatcaatttctgggaatatttatttataacaaaacacagttgatgatacaaaagagagactattcactagtaaaacctgagttactagcctagaagacaaacgagaagaaatacctcaaagaatgaagcataaatgcaagataatggaaataattgaaaaaagataagataattgggtgcatgtgaagaaaacctaattgaaagatagtattgcagaagaaaaaaaaactatgtgagcaaaataatattattaaacaaatataagagaaaatttcccccagttgaagaatatatacatctgcaaatttaaactacacaccaaattccaggcagaattaatgagaaaaaaaaaaagaaaccctaaacatatctgggtaaatttcttgaattccaaggataaagaaaaatactgatagtgtccaaaagaaaagcctgagatatttacaaataaaacaaagtcagttctggcataaaactttcagaaattaaaatatatatgcctttcttttttttttagaacacctctttcaatcagtctttcaaaaatggtctatgaagattaactttcttggtgctttttatgtctaagaattattttttttttctgttccacttgatttctagcttggatacttattcaattctatatccaaattatttttctcgtagcttaaaaaattaaaatttgtgtcctcattatcgtctaatttccattttacttagaatgcaatttagaatatcccttttgaggttgtcttatttccatggagttctaaatattccctttaaggtatctaggtataggtttttgccattaattttatctagcactgacactttcagcctagaaatgtatacttttatcatctgcaggaaattatactgttacttatttattcctgtccattctctttgttcatttcttctgacattcagttatatggttattggatcttcatttacctcactgtctcttctttaatcttttgtaattttttttttgtttttatgttattttgttggaatatcttggattaatctaactcttaaataattcagacttccaccgaattcaaacttcgattgagctctttactttctttgtaaattttatttttcaagacttattaaaatataattgacagataaaatttttacatatttacaatgcaggatgtgatgtttcaatattgtatatattgtgaaatgatcaagtcaagctaatcaacatatccaatacttcacttgtcatttttttgtgataacgtttaagatctattctcttggcaattttcaaatatgcgatacattattattaactacagtcatgtacaatagatttacagaacttgtttatcctgtctaatggaaatttgtacactttgatcaacacttccccatcttcaccccatcagctcctagtaaccaccatttataaaccatctgataacaggctaatatgcaaaatatataaggaactcaacgcaacagcaagaaaacaaataacaattaaaaatggtcaaagaatctgaatagagatctgttaagagaagaaatacaaagggccaacaggtatatgaataaaaggctcaagtcactaatcatcaggaaaatgcaaattaaaactatgatgagatgtcacctcacaactgttagaatggctattatcagaaaaacatatatatatcacatacatacacatacgcacacagactaacaatggctcattgtatgaaattttattcatccttaaaaaataaggagagccaatcatctatgacaatatagaggaacctgaaaaacattatactaagtgaaataagccaggcacagaaagacaaatattgcacaatctcatttatatgtaaaatctaaaaaagttgaacttatggaagcagagaccagaagattggttaattttttttcactttatcatgtttacatttacattaaagaacaccaattaacttactttatagtagtctattttgttttatgaatgtgatggtcttctaaatatatctgagaatttagttagatttattgtttcagttaccttttgattccattcttcatggttttcttagtatttattgttttctttctgtatttaatattctactttcatgtgtgtattttcctcaactttggattctattcatgttttaaaataagaataccctgtatacctgcactgagtggcagaaggaactgtgcaatgggatgtgaggagggtttatcttcataatttatgtgttctctgtatttctatggctggcaagtgatctggagcactgccttgcttctctagcatgaactacaacattaggagtctcctcttttgcaactcccaggtcagaatttaagctttattctggggataaagcctgaaatcaccttctttttctgtcttctttcttcatagtgttttgttgttttttatggttctctttgccttgtttccagtcccaaactcatactaagtgtaatcaatgggttgaaaaagtacatctcttcactgtgtagtagtgactatgtcagagggagagtagcccatatgactcagttgctcagaatgatttgctttaatcagctgctctgacagttgccccaaaaccacatgcagctttgaatattttttgaccctttgtatggacgacctcttctttcctgtttatgtttaagttttctttatccttatatatctatcaattcattctgatttgttttctatcttccaggaatttttcaaaattcatgaactattgatcatgtcctttttaaaaaattttttactactgttactacttgtactgttaagtttattttttcctacataattttgtgggggaaggaaaatagatgcagatgttgtatctgaaatctttatttaatctgatgtatcacttctcacctatcacactggtaaactttcaaaaatataagacaatagctcctgtaggtgacactgtggagaaacatgcacttcatgtttccccacacaaagaatgcaaattgtacaacccttttggtgggaaacttggcatacctaatgaaactacatatgccctaacattttgattcagcaatctcacttctaaaaatctatcttgcatatgtatttttattcctccaacactataaaaatacatagcacaaggttatttattgcagtgttgtttatatatgcaaaatattggaaacaacctaaatgcctatatatatggcagagtggctgaataaactatgatacattcacataatgagaactatgtagctataaaaaataatgagaaaaatctctatgaactgatatgggataatttcatctgacatactgttaagtgaaaaagcaaagcagaaaaaatacctatagcatgctgttttcatataagaaataaggggacataagaagatactgatgtagctgcttatttgtaaaaacacatttttgtttctgattaatcagaaactaaagacaaacaacaacaaaaaaaacctgtttacctgtacaaataggtaggaaagaaagagagaaagaaatgcagaatggtctcagggtagcagagatgagaagggaatatatctgactcttagatatatttgtatatatctgacccttagagctatagtaatgtttcaaaaacactttacatttcttaaaacgtaaacaaatatgaacaaccaggatgtacgtggtacaaatagtacccccattaaagaaaaattaagtcaggctaggcttcttgtcaataaaggataaaaaaaattgttaagcaaataattggtcctaccaaaagattcagtagcattatagaagaaaataaacagaggagttttcttacaagtttaaaaaggacctgaggagatgttgatcagaggatacaaaatttgttaggagaaataagttcaagagatctattatacaacatggtaactatagttaataacagtgtattatgtattcttgaaaattgctgagagtagactttaagtgttctcaccacgaaaaaatatgcaaagtaatggccggtcatggtggctcacacctgtaatcccagcactttgggaggccaaggcaggcggatcatgaggtcaggagattgagaccatcctggctaacatggtgaaaccccgtctctactgaaaaacaaaacaaaacaaaacaaaacaaaaaattagccaggcgtggtggcaggcgcctgtagtcccagcttcttgggagactgaggcaggagaatggcgtgaaccagggaggcagagcttgcagtgagccgagatccaccactgcactccagcctgggtgacagagcaagactccgtctcaaaaaaaaataaataaaaataataataaatatgcaaagtaatgcatacgttaattagctcaatttagaaattccacaatgtaaacatattttaaaacaagttgtatacaatttttatttgtcaaataaataaataaatgtttaaaaggtatgtttctaaatactgcacaccataaaaaattataatgaaacttagtgtcttttatttttctctcatgaagaagcatgcaagtaaacaaatacaaaataacatggattatctaaaataagcaggaaatatgggatggccattgatatggtttggctgtgtgcccacctaaatctcatcttgaattgtagccattacaattcccacatgttgtgggagggacccagtgggagataactgaatcatgggagcggcttctcctatactgtgctggtgatagtgaataagtctcaggagatctgatgcctttgtaaggggaaatccctttctcttgattctcattctctgtcttgcctgctgccatgtaagatgtgacttttgctctctgccatgattgtgaggcctccccagccacgtggaactgtaagcccattaaacctcttttctttataaattacccagtctcaggtatgtctttatcagcagtgtgaaaacgaactaatacagccatgcaatagagacataaagtagaatgacagagtaaatgaaaagaagggagaaagaaaaagtgccatattaaaatcaaaatgagactctaaagagcaaagatttaagctgactctaaagaaaatcaaataagagaaacggatgagaaacatttttaaaatgtggagaacaataagtgaaaagatgtagaccataacacaaatatgtaaaaggaaagctaatacagtgggaacaaatgaataatcagtgtgctttatgaaggaaatgatattatggaacaaatcaatatttaaaatacaaaaaaattatgactgattagagacttcagtctacagattgaaagactcaagactcatgactcacacaccacctgaacaggacaaattaagtcaactggagtgatatgggattagaatcttaaaagaattttcacaaggcttcttttaattcaacactattgcagaatcacagtcagtttctctttctgcaagatatatcttttaactgggaagagtttatgtttttcaacgatcactgtgatatgacatgctacttctttaattagagaggtctgtagcagagacacttcacactctcaatcattaggcaaaagtggtcatttttctgagaatatcttcttttctggttccatttcaattattccatttccatgttaaagcaattttcttaccaaactttgaactcatttatttggctgcttttgatttagacataaaccaaaggcaatatgtttatatggcttttctgacacttttattgctcatctttaaagaaaaaaaactcagtgagttttacttttcaaaaatatttactctttttttcaaactattgcttttgaatttttgagcaatgttaagaaaaaaatgtagaataagaaatgttatggtgtagacctggtaatttattgaatctttattaaacaaaaattgacttatgccaggaccataggttttaacaactgtatagttagaacctgaactagggtcttgcatatcattccagtgaatttttaggaaaaggttttatttcttctctttaatcatgtattgaatttagaaaagcactacactcagattcaacgtctaatcctgtaagacaagcatgcctcagatatgttactaatgggaatcaatgaaagaaaagtaaaagactgaaagatcttaatcgatcacatcaaggtccaagtgtttttgctataaagtcaattgacactaaaccagaaatccaatattagatttcatttaaaatttgactgccttagaattatgatgagcttaatgagttactaagtgaaaatgtcaacaaatcggttatggtgaatttaacttttgtagagccttacacagagtaaagacaggaatcctggaccaagacatgttgcctcagaagtacgtgctttcacagcaacaatcagatcttgtgcatttgtcatgggcacttataggaattgcttttctattggtctccctaactcaagcctccttccccttgtttcctacattctgtgactagcagtgctcatgcaggaaatatctggtaggtaatgcttgttattgttgaatttttaagaaataattggcaaaaagaaaaagtatatatcaaaataatacctgcactcacttgtttatatgtgcccatcaacagtgaattggataaagaaaatgtagcatatataccccatggaatattaagaagccataaagaaggaatgaaatcttgtcctttgcagcaacgtggaggcagctggaggccactatcctaagtgaattattaatccagaaacaaaaccaaataccacatgttctcatttataagtgagagttaaatagtagatacacacagacataaagatgacaatgataggcactggggactccaaaaggggggaggtagagaagggaggggaacaaggttgaaaaattacctcttggatgctacattcactatatgggtgatgggttcaacagaaactcaaacctcagccttagtgaacaaatctgcacatatatcccttgaatctaaaacaaaacaaaatttaaaacattaaaatatttggcaaattctagttatcctttaggagaaaggttgtctttgatagtaaaaggtcaaatgcaatgctggagatcaagaaggacagcatctcaagactatgggcattatttttttattaaagaaggaaatttttaatggctttattattctatatactcttctcagatcagtttgatttaggctaacaatggtcacatctcacttacctggcacaatgctggtaaacaattcagtcataaatagggaagaatggataatctaaatagttaagccatgcacggtggatcatgcctgtaaccccaacagtttgggaggccaaagtgggattgcttgaagccaggagtttaagaccagcctaggcaacatggtaaacctcatctctaccaaaaatacaaaaatcagcctggcatgatagcatgtgcctgtggtcctagctactcaggaggttgaggtgggaggatagcttgagcccttggaggttgaggctacagtgagccaagatcatgccactgcactccagacagtggagtgacaggtaacagagagagaccctgtctctaaataaataaataaataaatgtagttatatttatctatagggtacatttttatagaaacagcaaagtgatagtctttatttttattgattcatagtaaaactaatgtggaaattttaaagtcataaaaaatgttctagacaacatgcacaaactctagaaaacaaaaatttaataaatttgggagtgagacagctataaatcattcacaaattgcaaattcttaatttagtattctttaaattttttaaagaaatgtcaatattagagatagctgttttagagcactgtaagatatgaaattctctgcttatgacctcaggatcattatgttagaaatgcaagagacatggaccgtcatgtccaacatttctcaaagttcattccatagctctcagtcacactctgaaaaaaaatattcactggctaatacatttgtgaaactcggaataatatacatctcctatagagatttatacaatagtcaacatatcaaagtaatgagaaatcttgtagtatgaaaagctatttaactttgaaagaaaatatagcatgatagttcaaaagatcatggatgctagaactagactgggtgggtttaaagcccggttttgcttcttagtagttctgtgagcttaagctacttatttaacctcactgtatctgtttgcttaaataaagaccaaaaaatgcctatttcaaacaatattcttggaataatttaaacaagtcaatatagagaaaaaatatagtatcgggcacatcataataactattatagaacattttagttggcacttctcaaatataactgaccatttgtgtgtgtacacctcttaatagcccaaagaacatgactttgtccaagctcatttttttttagatggagtcttgctacattgcccaggctggagtacaatggcaggatcttggctcactgtaacctctgcctcccaggttcaagcaattctcctgcctcagtttcctgagtagctggtattacaggcctgcaccaccactcctggctaatttttgtatttttagtagagactgggtttcaccatgctggccaggctggtctcgaactcccgacctcaggcgatccacccacctcagcctctcaaagtgctgggcttacaggcgtgagccattgtgcccagcccaagctcattttaagaaaagaaaaacaacactcacaaaggccaaattacattgacaggtgttgacagggagtaactaacaggtagaactagaacttagttctccttcatccctatccaatcctgtttcacagtggcattctacattttaactaggtgatctctagactaaagaatatttctgcatatatatttttctatattttatacgtagtcagtcagccattatgggtttcatcttcccttaaatcttaaaaccccgcatttttacctgtgggcaataccttgaagtttcagaaaatgctcaaaatcttccctgaaattgtcatgatgtattgataggattattcagtaatggaaataacagagattttttagaagttttctgtaaaaaatttgcaaaaaataatctagcttttttattctaaatatatttgaagggaaaagagatctaaaatttcttagtaaagacatcaaaacaagtgaaaatgccctttaagtcatagtgggttttttaaaaaatattttctaaaagtccagctgctttcattcctttctgatattgtaactgcttctagtgtacctgagaaccaggcttcaaataaagctgcagcttttaaaggaaacaaaggaagttgttgccttagcaacaggaactacataaggtcccacacagcacttctatctctagcaattcccttccagttctgtatgtgtgcacctaaatagcatggagaatggagctctgcccttggactctttcaataagagaattcattgaaattttctttggaattaggcagtttcatgtgggaacttcagtggcatgtctaagatgcctattgtgaatgggaaaaaatgtagatttgtgaaaatgaatcacatttgcccatatggctaactctaggtaaacatctgttccttacattgtgttaacagaaactaagtttggggaagcctcatactttaggctgtaaaagaatggaatctgtgaagctggaaaacccaccatatgtcttctactcctaagcaccctcttttgccttcagttctcaaacatgtttacttggggcatgtgatagcaaaataaataaataaataaatatcaaaaggcatctttagtaggaggaaaatgaaagacttcattgcaatagaaggaagtggagcaagatggcctgatagaagctgccagtaattgccccctcgactggaacaatgaagtgaacaactatccgtgcaagacatcaccttcataggaaccaaaaatcagctgcgccatcacagtgcctagttttaacatcacagcaaagaaagaggcactgaggaaggtagaaaagatagtcttgaattgctgatgccacccctcccgactacctggcagtggccctgtggtgcagagaaaatatgtgttctcagaagagagagagcacagtgattgtgggattttgcattgcagctcattaccgcctgtcatagcagaaagcaacataaggcagaattcagcgacacccaaggagggagcatttagaccagccctaaccagagcgcaaacatccatcccagtggacagacctgagttccagctagccccaccaccataggctacagcactcagggagcctaaaaaaacttgaaaggctgtataggctgtgaggactgcaattgctgggcaactctttgtgctgtgctgggctcagagccagtggacttggagtgcactcaatctattatattaagacatcagcctgggcagccagaggaatacttgcattaccggtcccctaatcttagacagcacagctcgcagctctaggagagactccttccttctgcttgagatgaggagaggggagagaaaagaggactttgtcttacaacttggataccagctcggccatagtagaatagggcaccaggcagagtcctcaggtcccagttcaggctctagctcttggacaacatttctagacacacactgggccagaaagtaatctgctgccttgaaggtaatgaaggatcctgccttgaaggtctagccggatccatcacctgcagacgcaagagcccttaggtcttggataaacaacagtagccaaacagtactcactataggccttggtgagccccagtgcagtgctggcttcaagtgtgacccagcatattctctgctgtggtggccattgagagacttcttgtgcttaaggaaagaagagggaagaataaaggaggctgggtgcagtggctcacacctgtaatcccagcactttgggaggccaaggcaggtggatcacttgaggtcaggagttagagaccagcctgagcaacatagcgaaacctcgtctctattaaaaatacaaaaattagccgggtggggtggcacacatctgtgtgatcttaggtactcaggaggctgaggcaggagaattgcttgaacccaggaggcagaggttgcagtcagccgagatcacaccattgcacttcagcctgggcaacaaagcctgtctcaaaaaaaaaaaaaaaagtaaaggagactttgtcttgcagcttgagtaccagcttggacatagcaggatagagcaccaaacaggcttctgagattcccgattccagccttggcacttgaaccacatttctggacccacgctgggcagagggatgcccactgcccttaagagaaagacctaggcctagcaacattcaccataagctgactaaagagccctgggaacttgggtgaacattgcggtagccaggtagtatttcttggggccatggggtagtagtgggcatggggggagattccttctgtttgatgaaaggaaaggaaagaatggaaaggagaaaggacttagtctcgtggcttgggtgtcagctcaactgcaatagaatagagcaccgaatagattcctaagtttcttgactccaggccctagctcccagacatctcaggacctgccctgggccacaggggagctcaccactctgaagaaaaaaacgcacgcctggctagatttgccaccagctaactaaagagcacctgggcactgagtgaatatcagccacagctagaaggtagttgtcgtgggccttgggcaagacccagggctgtgctggcatcaggtctgacccagcacagtcccattggtgatgagcaaagtgtggtttatgttacccctcccctagctccaggcagctccattgtttaggggaaagtaagggaagagaacaagagactctgcctggtaatccagggaattctcctggatcttacccaagaccactaaagaggtacctctatgagtctgcaagagtgacagcattccaggacttgggctgaccctcatgcagatatggcttcagtgaacaaaaacttagatcacaacattcaattccctttgaacactcggaaagccttctcaacaaggacaggtacaaacaagcctagactgcgaagactacaataaatagctacgcttcgatgcccaggcatggacagactttcagaagccatcaagatcattcaggaaaacatgacttcatgaaatgaactaaataaggtactagtgaccaatcccagagtgatagagatatgccacattttagacagagaattcacaatagctgttttgagaaagcacatgaaattcaagataacacagaaaaaattcagaatcctatcagataaagttaacaaagagattgaaatattttttaaaacaagcagaaattgtgaaacagaaaaattcaattgatatattgaagaatgcatgtgattcaacagcagaattgatgaggcagaagaaagaatttgtgagcttgaagacaggttatttgaaaaccaaatgtcagagaagacaacagaaaaaaatgaaacatgtttacaagatctagaaaatagcctcaaaaggacaaatctaagagttattggttttaaagagaaggtggagataggtgaggtagaaagtttattcaaagggataataacaaaatacttcactggccaggcacgatggctcacgcctgtaatcccagcacattgggagactgaggcaggtggatcatgaggtcaggagttcaagaccagcctggccaagatggtgaaaccccgtctctactaaaaatacaaaatttggccgggtgtggtggcgggcacctgtaatcccagctactcaggaggctgaggcaggagaattgcttgaacccgggtgatggatgttgcagcgagccaagattgcaccactgcactccagcctgggtgacagagtgagactccatctcaaaaacaacaacaacaacaaatttcacaaacctagaaaaatatatcgatattcaactgcaagaaaggacagtctcttcaataaatgatgctgggaataccaaatatccacatgcagaagaaaaaactggacccctatctctcgcctggtacaaaacccaaatcaaaatggattaaagatttaaatttaagacttcaaactatgaaactactacaagaaaacattacagaaactctccaggacattggtctgagcaacaatttcttgagtaatagcccacaagcacaggcaaccaaaggaaaaatggacaaatggcatcacatcaagtttcaaagcttctgaacaacaaaggaaaaattcaacaatatagagagacttcccacagaatggcagaaaatatttgcaatctattcatgtgacaagtgtctaataaccagaatatgtaaagggctcaaacacctcaacaggaaaaactctaataatctcattaaaaaataggcaaaagatgtgaatagacatttctcaaaagaagatatgcaaatggaaaacaggtatatgagaaggtgatcaacatcattgatcaacagagaaatgcaaatcagaactgcaatgagataacatctcaccccagttaaaatggctttatccaaaaataaataatcataagtgctgacaaagatatgaagaaaagggaaccctcatagactattggtgaaaatgtaaatgagtgcagccactatgaagaacagtccagaggcaccctgaaaaactaaaaatagaactctcatatgatccagcaaactcactgctaggtatacacccaaaagaaaggaactcggtatatcaaagagatatctacccttctgtgtttattgcaacactatttacaatagccaagatgtggaagcaacctaagtgttcatcatcaaatgaatggataaagaaaatatggtacatatacacaatagagtactattcagccataaaaagaatatgatcttataatttggaacaccatgaatagaactggaggacattttgttaactgaaataagccaggcacagaaagacaaaattgttctcatgttctcactcatttgtgggagctgaaaattaaaacaattgaactcttggagagtagaatgatggttaccagaagctgagaaaggtagtggtggagaggggggaacgggaatgcttaataggtataaaaatatagttatgtagaatgaataagatatagtatttgatagcacaactgagtgagtgcagtcaacaataatttagtgtatgtttaaaaatagctaaaagactttgggaagccgagtcaggtatatcacttgaggtcaggagttcgagaccagcctggccaaggtagtgaaactccatttctaccaaaaatacaaaaaattagccaagcacgatggtgtgtacttgtagtgccagctactagggaggctgaggcatgagaatcgtttgatcctgggaggcagaggttgcagtgagcggagattgcaccactgcactccagcctgggtaacagagcaagactctgtctcaaaaaaaaaaaagttaaaagagtataatttgaatatttgtaacacaaaaaaattataaatgcctaaggtgacagatacccatttatctttatgggattattacacattgtatggttgtatcaaaatatctcatgtgcctcataaatgtatacacctactatgtacccatattaatccattaaaaaggcaatgtaaattactattccttttattattcaatatcttgtattatcatttaaatttaaagatgctgaaatgttcaagttcagcctaggtgcctgtccctccatagtcaatcatatctcagtgcctagagtcaatttattcactgactcattcatttgtgaaagtaaaatggactgtgtgtttgtgtttgtgtttgctacgttagagattcagagtaatacaaaacatgaccactgcctttgaagggttgcaatgttgccagaagatgagataagtcgtaaacatgaagtacattaaaaattcaagggcaatattactcttacagttagtcatctatgaatgcttttagttttaaataccaataatctggagaatcacactctctttcctcttccacatcaatgtcatcctcttcattcatcctcataaactatgttctaatcattccttcttttgtcttctttttctttccacctccaggctcttcccctttatttttattaagtcaacaaatgcatgtgtctctgctacatgccagacactatactagatctagggatttaaaaaattatatgattacacaaatatttatcaatactttacagaacaatcttttaaaaatcaaatatgatcatagaaactcttcgcctgaaacttcttactcagtcagcctttgcttagtatattagtttcctaaattgttgtaacaaattactgtaattttcattttcctctgcctccactattgcctataaggttagatcacttcccatcactgtatctcctacattttattttagccctactggatttctgacaagtgagtaattttttcttctacgactgtgttttggaaattctattccttccaactaaaatggtcaatctcacttgtcaaactattaatcttttactcttcattcatattcataacaaactataaccacctcttctagtccctaaaacatctccttaatcaaactgaagaactccttttttcatatattcaggtttgctgagcatgttcctacacattctcatcaagtattaaaatcatttacaactttatctcactttaaaactatgagttctctaagcacagtgaatacaattttggtatttaagaagatgcttaataaatatggatgcctgaatgaacaggtgaaagaaaattagatcagaatccaacatatgcatagaactctgacctctagaaaaggatatgatatgtcacaaagctgttaatgcattgtggtggttgtaacataatattcttttgagagttttagcaaaagtcctccttatgtacaaatgagttataaataaaatcccctacctgagtaggattgaaaatggggattttatttataaaataaatagataaaatccacctgagattccgttgctacagattaaactcggtttatgaggcacagagaaaattttttactcttttaatgcaatcgaggagtcttttgcttaaattgaaagctgttttataaaatcatttggtagcattaattaaattcagagataattaattaatatatgatattcacatagcacagttcctagaattgatctagttttaatggaaattacaaagttttgctacactgcagtccaagacttgatttgaaaagaaatactatgtaatttataagaattctggtaagagataaaaaaaattctcactgtgaattatattagtcacttttatttcagaatgtgagagatgatgctgtgtctggagaatacagatagaagcaggcaggaaatatgagttggggtagaatttgaatgtgtaaaaccagcagactttaaacatagtgctgaaacacatttagcctttgccatggaatcactgatgaaatctagcccaaaaggttgaaaagccctccactccttcccacctgccaaaactttgtcatatgtcacaaaagaagagagtcccacatttcttctacaataagggaacagatctcactaggccaagagaagggtctcacctctccttcctctctgctaactttccactctgttcagtcaggccttgtttgttgtattagtttcctagagtgctgtaacaaattaccataaactggatggactaaggcaacatcgatttattctcttcttattgtggaagccagaagtccaaaattaaagcactgctgtgcttcctcctaagactctggagataaatctcttcttttcctcttccagctgctggtggcgccaggtgttgcttggctcttggctgcaccactcccatctctgcctgtcttcattttacctcctccttttctctctcaaaattccatctgcttctctcctagaaggatacacgtgattgcatttagggctcactcagataattcagggtaaattccagaaggagctcaagatccttaacttcatctcatcttttgacatacaagataatcctcactattttgccctataaggtaatagttacatgctctgaggattaagacttaaatatatttttgttgcgggagggcaccatttgacccactacacttggattgattgctagagtgaaagaagttgtgttgatgatggttgtttcctttggagcacattgcatgttcactttggggcattggcctctaaccccatacagtggtgagaatttcatggcttattgacgatgatgctggacaaaaggcacaacagcttccttttaccactggcttcttggaagcctgaatggaccctgaatactgcaataggcaatatattaattaaagctgcctagaataacctttcatgttgagtgccccttccttgttcctacatccccatgaaatctgtgacgatctctgcatttgatggatattaagtatctatgtttccattgcaagcttctgtgggataaaaattataccttctttatacttatttaattagcatctcacctctcgcctactgcattaattgttttttagtgagtgtgtgttgaactaagctgaattgcatctaagttaggtttagcaaggcatctagagtcttgagaaaagtatggccagtgtgagaacagcattagagaatctctcacccttttactcctcaagataaaagtgtctttcttctaggatgtacatggcattagagatgatcttgtctttttctgttactctatttattggtttttcttctttctggctgagacgtattgattgccagccattctcaaatcacatgtgatgttgattcctctttcttagcaaacatgcagtcatagaaattactgaggaattgattgattttgtggttgtaaatatcctgggctgtttcccttaaattatatggaagtttccctcttgatgcttgtattgagaagtgatctaaagaggaaaccagagctagagacagtgctcccactccatgtatttccatatataatggatagcgttatttcctcttgatgcttgtattgagaagtgatgtaaagaggaaaccagagctacagacagtgctcccactccatgtatttccatatataatggatagcattatttctattgacattttctgcccctttactttttgcctgtgaattatctcagtgtattattaggcccaataatttaatgtgatagattcaaagggaataaaacaattaaacaaaatagcaggaatttcaagtaattactgctgaaaatcagaatttacagaccccaataccttgaaaacatacaattagcattcagaataattttatgatgtacctgatttgtgtttcagggaagataaatgttttctttagatatgagttccaaagaaaaacaccatcacatctatccatttctagttcagtacattaggagaactgtcttgtcacaagacttgtcttagaaagactgaccctgtccccatgagaaacactgtcaattcagagactaatagaacacttaaagccatttgtttccccaacatctcatttttatttctatacaaagctgcagtcattttaacaagttgagaagagaggattagaacaattctgttaggtaatgagacccagttccgtaaagcttttctcatcaatcaatctctttaatttaaggttgcattatatggcattaaaggaatctccttcatgcttattatcctcacctacctagtgagaaaaggcttacgtggaacaataaggatggaaatgggaaaaggaagacaaaggtaaaaacttggtggctaagggttagggtgctaagagactgcagacaggaatccaaagcttaattcctatgacaaaagcagacctatggatttagacaggacaacaaaacaggaaatgcctgttccaaaaaggacaaaagtgggataaaggaaatatgcaggtgggttctaggttaaagccaatagcgactaacaggggactgatacagaagcaggactggaaagcaataattgagtctagtgagcagcctcagtttctcctgatcagaagcccacgtttatttgggaacattttctgtactcatgtgtattgctgcgcatgactccaaatcccaaaccagattttagcagttcacagaacttgataacaagtacggtaccactaacaaagcaatgaggctcaaagaccccatggctatttcggctatttctgtaacttctttttcatttgacacttcttcaactctcataccagaaatttcactattgcaaatcacttgtttccagacaaacaccaattactctcttaatcttcctgtgatgagggagcttgtctaatttaaccatttcttctctgagcctgacctttcattgtcttcaagcaaacaaaaggtttttctggctttgctcttcaaataaatcactctgagaagttgataaagtaaagttctttgggcttgttgttggatatgctttcactcctcttatatggtaattttcaaccatgcttttattatgcttacctttgctaaagaaactgtcagcaatttagctaaatattttaacagtggtgaatctagaataggctatttcttctgaagagttgctgcttttggaggcctggggctattccagatacttctgactatcctaaagcttcatggcccaaggaatcagactgaaattataatcaagtcctacatggtactgagggtttctttaatcatttaaaaacaggactttagcaaaaacataaatggttttctatgacactagagtgaaatttgcatataatcaacctaataaattcttatacattataacttttttactaagtatttgacagtttgcctactagttaatagtttgacactctagtcaatattgtaagaaccaaggcagtgacagatcatgatacattttaaagtgctgaagtaaggaagaaaaaaaaatgttttgtctcaaaaaaattactctgaagacagattaattacataagaggaagttggagttggctctaatttctacccatggtttttgaatcagttttatagaactttaaatgttcaagttttctaccctataacttttttattctatctgattttgatgagaatgggaagattaaatgctaaaatcttaaaaggaaatatattactttttcatattgtacctgaatccaagaatctgaaaactcctggatacctgtgaaatacttggattgaccttgcaggtagattaaaaaatacctatcagtgggcaaatacgtttccataatatcacccatttcaaaaccaaatagagaatgatacaggtaatattgctagccaagaaatattgaaagtcattactgaagcttggtttcatccttcttgcttcctgctatttaccaaacatgagtattttctatatgacttttcatcaaccattctcataattcaccagactcaccctgtttctttcctatcattacccctggggaaaaaaagcagctttatatttttgcatgaagactaatattcttaaatgctaataaacggaacttgagttattataatataaaatactacaccaattgtatctcagtatatcaaacagtcttatttgtcttgacacatggtattttgctaatggaggagatggtcaaatgcagttattcttggtcataacatattacttattccattgaataatgtaatgaaatagctccttttaatgtgaaaaaaattgtaaatggttccatagcagacattttaacaatttagcttttacgtttcattagcagttaaaataaatgaaagtaaaatatttatttacaaaaaacaaatcaacttgaagtctaaaatatattagaattaatgtgggaaatatgtttacctttgtaaattaagctctttgcattttcaatcatctaacctattaacacagctgtcctagtcacacagagaactcagagcaggactcagtcatgaggaaatctcaaaaactttgcaaatacataaaatgtaattcctacattagcataaacagcccatgtatacagggatatgggttgtgttcaactgtttatattaggctgttcttgcattgctataaagaaatacccgagactgtgtaagttataaagaaaagaaatataattggctcacagttcttcagcctttacaggaagtacggtgctggcatcagctcagcttctaggaggcctcaggaaggcttataattatggtggaaggcaaaggggctgcaggtatgtcacatgacaaaagcaagaaagagagagggagggaggtgccacacatttttaaactaccagctcttgtatgagctcatagcgagagctcacttatcaccaagagaattcacttatcaccagccattcatgaagaaaccacccccatgattcaaacacctcttaccaggccccacctccatccctggggattacatttcaacatgaaattcaagcaaggacaaatatccaaacgacatcaactgttgacagttttctttgctcagtaatgtcaaatggcactcctaactgagccttcacaactatacatccctggttgcagtagacttactcagaaaattttgaaaatgaatctttacaatcttcaaaaaacacaactgacttggcaaaaaagatattataggacattaatttatgaaatatcctctttttttcatatttgttctgagttttgcttttggtattggcaaggaaggtaggtatttcgatggcaaaaatccaaatctgttattttcattagatagacgtgtagcaaaagaaatgagtctggtaggattcctattccttctatatgcactttccaaaaatatagcaatctacttgtagcccataagtagatttctaagccatctttgttgattaaagcatgttactaatgagttcatattactgattgtgatgtgtcagtttccttcactttacttcataatgtcaaattgcacatctagcttaacattcacagctattcatacctggtaactttcaaaatgttggtttcctcagtaaaaatgcattaatgtgtgtttgcagggctaaaaaatgaagaaaagaaaaggaaagccctcaaaagacatcaatggcattctaatatttgtctcaaattacaaaaaattgaaataattcaagaacttaaaaatgatgatttaattattacatttgtaagcaaaatatatgatgcacatgtaaacaaagtgaagaattgagatagattgcctgataatgcaagagaaacagcagatttaaaatatgcacaagtactacttactttggtccatttgcagttaaaaagaaaatgtttacatacccacctcccttactgccaaccgtgtatattccaatatgttctctctctcttaaactcagcactgagttccttttattatttatggtgcactaagtgtccgaactcaggtcttcccacccaaagaaaagcaccctataccagtggctttcaaatttgagcttacatctgaatcacttcattaaaacacaaatgtctgccattactttagagttttggatcaacaattcacatttttaacaggtttccagcaatgctgatgctgccggtccaggggccacactttgagaaccactgccctatacttaactatcctgagtttgaggaggtaggccttatctcaaatattctcatcaaattaccctgtaagattattatttcttattagatgctgaagtgttgggatggtggaggttcataaaataaggataagacataaaaatgaacaaagttactttcttctttctttctcattcttttttttttttgtccaccctcctctccacctccaagacagctaattctagcctattaaggatatgtaatctaaaagaaaattcacactacaatgtaaatggctgacttggagctgtatgaagtgcattaagcacattcacttgttaaagagcagcttgttaaatggattgatccttcaatcataagttttagccaactagattattaagagcaggaagcctttctgaaatccaactgatctctttatcctctcaattttgtctggagaagctcttttttgggtgggaggggaaaatacaaacacttcccacttactattgatacagataacccagtaagaaccaattttcagcagtgcttctaagtgacaatagaaggtaatacattaggccttactcctcagctcatccattggtatgaggctgaagtaaaggtgatagccacttcaacatccctttgggcctgttttctccctctacaaagctgaattagttttgcttctctagtgagtgaagagcttctctgtgccccaaaagaggaaaggcagctaaagatttaaaagaataaaagaatgcatgtaaaaactgtactaaagtaaataagaaaatagataaaaataaatgacagatagatagaccgacaagacatacctgttttttgtctatatctggttggatagtgccaagaattaaaagcaaaagagaatgaattgcaaaaatttcctactaagaactaaaaacaaaaagtaacttttgttcgtttgtttgttttgtttgtttgttttttgagacggagtctggctctgtcgccaaggctggagtgcagtggcgcgaactcggctcactgcaagctccgcctcccgggttcacgccattctccaaaaacaaaaagtaactttgaatcttccaaaaatgtttaaaggaccacaaaagtaataagataaactttgtcaacttttctagaaactagctgatataaatatattcgcctcattttttaacattaaataaattgtaaaatacacattaagttgaattcttctttactctcttttctagtcccttctctttctctagatgtactcactatcatgaattttctatgtatcttacttatacttttactccatttatatgcatccatggaaatatacaatattcattagttaatgcttcataaatagttttaaaaatattattcttcattctttttaaatatttcttttcctcacacacaaaatgaatttcatattaaataaaagaataatatatctttcccaacttccccttctttgacaattttttaattcaagccactcttacatacgtgtttgtctgataagtgaactctctttaagcatctccaattttcacagagcatgagaacttacatacaaattaacattcttgctcctcatttttattcattatacttttctattagcaggtttatttgaaaaaaaaaaaaaaaactggaatacatcaagagcaaccaggctatattggaaggggccttctcttctgtctttctcgttatttaggtagtggcaaatacattagcaattgacaacctatggaaaatttctaccagttgacaaagggaaaagtcccagtccctcctcacttaacattctaaactgttgactgcactcaagatgcacctaagatgaaacaatgtcagttgcctaaagacatgattataaaaaaaatgtggacctcagttgtgtgtgtgatttattttcatctccaaacactcatccctgacttgtaatgcagaattaagagaacactgaattcaaattaaagatcatgcaaacaagatgcttagtctaatcattttcactttattatagcgaagtcttgttagggacccaaaagtatgaatttgtgatttcaagcctaccaaatacatttataattccacaaatgtatgctataaaaattgtaggcacatattttcttcccaaatttgctaaaatcatagagttaacactagttttcctctttttgtagaacacattcctagggaaagatatactctttagatagatatgaaatttaagcaactttaaccacatttacttcccgtgtatttaaattcagaaaaagctgtatgaaaaagagtaggtgaatactacccctgttcattttgatttgattgatttgattttggaatgttacatcattattcccatttaagaacttttgctcatatggaaagaaatttgaaatggaagatataagggctaatttccattcctaggtctcccattgatcatcactatgataataaaaatacaattatcacttttaaaatgttaaatattgttaacattataataattatttcattttattttactacaatgtatgtcttgtatgaaatatcatgtgtaagtaatatttttctacatagtatctaggataagacacaatgagcttgagcttcagtttttttatctgcttaaagatcttagacttaatagactgggtgctttcagatcccttctggcactaccaatctttgattctaatccacaactccatctgtctctgatatccatttgatagaataaaattcagtaatccaaactgaaataatagaagactgatgaattttgaataataatagtccccatgtattaaaagcccattgtgctccttgcaattttatatctaatcctaatgacaactttgcaaagcagttgagattacatttattttatcaatttttttaaaaggaagctcaagtagtttactaatatccccaatatcattcaggtagtaaagggaataatcagcattggtatattgccacatcttccacctctcctgcccttttgttccagtgtacagttagcccttcatatctgcagattcaaccaaccacagtgaaaatattaaaaattcaaatacaaatttttaaaatatagtataacaactttatatagcatttacattatattaaatattataagtaatataaagatgatttaaagtatacaggaggatgtgcataagttatatgtgaacacttcaaaattttataggagggtcttgagcactcacagattttggtatccgcaggtttctggaatcaattccctattgatacaaggaaggactacattgctactcttcatacccagtccccaaatttatacaatatactttctttgctcatcatttttttattctctttttcacaacatttaccaagtccccaacactattccttagatgtgaaaagtagttgtctctaaattctcatcagaaatgcaatttgtatctggatctagtcgagttaatagcactaatcaggaaagtgaacatggttgggtaattttcattagacctcagctactcttcaggtatacagcagatagaaactctcaataataaaggtttacaaatactgaagagataatttattccataagaaaaggcttaaatcttattgagatggaaaaaagacctcatttcatgctacaagaagaggaagctttaaaaagtgagtgattttaatatattatttaatatagtaataacatacttgtatagtaattcacagttcatagaaatattgaaactatagataacattttaatctcttaatggttggaaaacaaaaccagcattaatgggaaataatatctgaagtcacatttaaactattataggaaggtgtttctaccaggttctttttagttttcaatatgttttacagagaaaattattaagcttatttcttcaaatatcaacaaattatgctcttttcttatctgattgccttacattttctttatccccagcttgatgttacacattaaagcaagatgatatgtaggaagaacctaatttatagatcattgcgtttgtactcttctgggcatttggaccattgtaattattgtaactaacagaaatgcaatatagatgatcactactccaatttattattgagaatgtgatgagtcagtagtattaaactaggcaggatgtaactggttaagggaagacacagcacactgatccttccatgtaaagtgagtttgatgctactctttattgaaaaggacataaattaaagacaaagagagtctaagtgcacaaagtaggcacccatttaagactccttccttaagattataataatacattaggattggtagaaaagtaattgtggtttcactattacttttagaagcagaaaccacaattatttttgcaccaacctaatactaatttatgtactaaaaatgcacacaaatgtttataatatctgggaaccattaaccaccctgctgagaaacaacatgtatgaagaaacttcgctttttattgaaggattttctgcttagaactatgatcatgagcatgccggaggacaaaagccaactctaaacacaatagaacaaaaagaatgaaaacaacaaacaacccgaagaaattatacatcttctgaattaatcaactctgaaaccatctacctctgtacttcttgatatggtagatagtaagttaatcatcatttcagtcatttttagtcagtctttctgaagcagaagaaaagtgtcactatggatgcagtatatctctggaaaataataacaatttattttacagcaaacttgagtttgtctaaattgagcactttgcctgctatatttactttgttctatttcagatacatgtattgctagaagctatcatgttttactatctttaaaattgtacaacacaaaatgccttgttgcaatgacatctaatgctcaagaataacttttctgtctgttcttctctcaccctttcctccaattcctgcaattacagcagcagacatggcttttaggaggaaggggacaaatttaggctgagggctacctcaaaatattttccaaaagttccaccactactatattattattattattatcattattattagaagaagaaggagaatagcagaaaagtaggaagaaaagaaagagaaaaggaggaagaggaagcagatgcattcttggttacctaatgtttatattatgtgcccattattaaatattctaccaggactgcattgtcttgagttttccattcgaacaactccactgttcaagttactaagctgtataagaaggaggcagaagacttggtccctgcattctggaaacttacaaacatttctcttcaatatagcaaataatagtttgtttctaacagcccatacaatgtatgtttgtaaagtaattgggccatccatcagcctgaactaagtgaaattatgcatttttaaaatattaatttacagatattgtcagaatgctaattaaagtttcttatctatgggaaaacatttcgaaagatccaaacagcagaaaatcagttaaattaatactttatatttcttcctttaatatttagcactgaaacttcaataagcaagattagtttcattattatgttttctgctgtagtggactaatttgcttgatcatgacaaacacatatctgaatatcatttgtaaatctcagttattaattagtctttaaaacagtgtaaattcatctgaatatgtaagaaagtaggagaaatatgattgtgacaaaatgttctcaacatgggaaaatatgttgcctttttataataatcaatacaataataagagtaaaataaaaattcataaactattatatctgatttaaacactggtatgactctattagattacatatgcttcccaacttatgatggggttacatctcaataaattttgttaatcaaaaagatcataagtcaaaaatgcatttaatacacctatcattagcctgcaaaaagattaaaattcagattttaaagtatgttttctactgaatgcttatgacttttgcaccattgtaaagtaaaaaaatcataagctgaaccactgtaaattgtggacaatctgtatttggttagaaaatatttcaagctcttcaaagtcagggaacatagcctatttaaatcttaatcccccaccttgcttaacccaatggcttgcaatgtagagtaatatgtaagtttttatgagtttaattgaatctataattaggtatttatgaaattacttagtctgataacaatttagattactaattactccataagaatctgaggcaagactgtagtagcaaatgacatatcaattaaattgcaagtgcaactcagacatatttaaaatcaaatctatataatttattacagtttttgaatctttgctttttcagaacacttgctttgctgaaaatatttggatcataaagactatattatgctgtttccttgatccagaatcttctttcaaacctctggttaaatgtcatttccttaggaaatcttctctgatctctctaactagattaaatcttatcagtatcatatacttactttgaataaacacaaatgtcaattgtacttgagtatttatttatgtaatatgctttcttcattagaatgtacgcattccagagcaaagaccacatttttcttgtttattgatctatcctcagtgcttgtattagtctgttctcatgctgctaataaagacatacccaagaccgggtcatttataaaggaaaaaggtttgcttgactcacagtcccacatggctggggaggcctcacaatcatggcaaaaggcaaaggaggagcaaagtcacatcttacatggtggcaggcaagagacagcagcatgttcaggggaacgcacctttataaaaccatcagatctcatgagacttagtcactattataagaacaacatgggacctgccctatgactgaattacctcctaccagttctctcccatgacacatgggaattatgggagctataattcaaaatgtgatttgagtggggacacagccaaaccatatcatttctcacctggcccctctcaaatctcatatcctcacattttagaaccaatcataccttcgcaccagtcccccaaagtcttaactcatttcagcattaactaaaaagtccacagtccaaagtttcatttgagacaaggcaattcccttccatttatgagcctgcaaaatcaaaagcaatgattgagttacttcctagatacaatggggtacaagcattaggtaaatacacccattccaaatgggagaaattggccaaaaagaagcgtctgcaggccccaggcaagtccaaaatccaggaaggcagtcaaatcttatatctccaacaagatatcctttgactccatgtctcacatccaagttaagctcatgcaagaggtgggttcccatggtcttggacagctctgcccctgtggctttgcagagtacagcccacctcctggctgctttcacaggatggtgttgagtgtctgtggcttttccaggtgtacagtgcaagctgtcagtggatctaccattctggggtctggaggatggtggcccttatctcaaagctccactaggcaatgccccatttgggactctatgtggaaacttccaccccgcgatttttttctgcactgccctagcagaggttctccatgagggctccatccctgaagcagacttctgcctggacatctagacatttccatacatcctctgaaatctagatggaggttcgcaaacctcaatttttgacttctgtgtacctgcaagcccaataccacatgtaagcctccaaggcttagggcttgtaccctctgaagcaatgacctgagctctaagttgtccccttttagccacagctgggatgcagggcatccaaagcactgcacaaaccagcaaggccctgggcctagctcacgaaaccaatttttcctcctaggcttctgggcctgtgatgggaggggcagccatgaagacctccaatatgccctgaatacattttccccattgtcttggtgattaacatttggctcctcattacttatgcaaattcctgcagcaggcttgaatttctcctcagaaaataggcttttcctttctatcgcatcatcaggctgcaaattttccaaactttaacctctgcttcccttttaaacataagttttgattccaagctctatctttgtaaatacataaaacaatgcttttaacagtacccaagtcacctcttgaatgctttgttgcttagaaatttttttgccagatgccttatatcatctctctcaagtttaaagtttcagagatctccagggctgggcaaaatgccagcagtctctttgctaaaatatagcaagagtcacctgggctccagttcccaacaagttcctcatctctatctgagaccatctcagcctggactttattgtccatattattatcagcattttggtcaaagccattcaacaaatctctaggaagttccaaactttcccacatctttctgtcttcttctgaccctccaaactgttccaacttctgcctattacccagttccaaagcagttccacatttttgggtatctttacagtagcaccccactctactggtaccaatttactgtattagtctgttctcatactgctaataaagacatacccaagacagggtaatttataaaggaaaaaggtttaattgactcacagttcctcatggctggggaggcctcacaatcatggcagaaggcaaaggaggagcaaaaccacatcttacatgatggcaggcaagagaaaatgtgtgcagggaaactctccttaataaaatcataatatctcatgagacttattcactatcatgagaataacatgaggaagaccggccccctgattcagttacctcccactgggtccctctcatgaaacatgggaattatgggagctacaattcaagatgagatttgggtggggacacaaccaaaccatatcagtgctcaaaaaatatttgttgaatgaatatatggagaagcaagctatgcttttacaagttgcaaggagctaatttctgtgcattttcacatgttttatcaataatgtcaaggaaaatattcaaaatataacaatctaaaaaccaaaattaactatgtattatgctctcatttttgtaaaaaaatatacaaatacaaaatggtaaaatacataaagatactatctctgtattctaggattatattattttatgtatgtatttatctgcatatttccaaataacatgctaataccttgtttcattatttttaattttagacattgttatataatgaatactatgtattgaacaatatatgacattcttacaaaaagatatgtacaaaatcagagatgtgatttttttttttaaaaaaagcatatcagctttagtagtaagctatatatattctatttagcattaacaagaaaactaaatttatggcttgtgagctaagaaaacacccatttaaagtcatagaaaaggcattaaataagttacaattatcaaagttaaatttgactcttctcttttctctggaataagtgacagttttctcactttagatatatatatatatatataatatatatgtgtaattttgaaaaacgattgttgtcaaattgttttactttacagcctactattaccttcctgaaacataaacatctaagttcatacggaggccaagttactaaaatatgctttagaaaattgagcaaagtcataaagtgtaagtagagtaggagagattgacagctaactgcacttacagttaatcggctaaaggtaaaataaacctaaaatgaaatcattgggtttttcccttttatattttattatttcttccatattccttacagaagtatcatacagatttttaaacacactaccctttaaaaatttttgttgtgttttttttactttacttggtacctatcattacttctttccctaagctctccaacagaacattaaaataagtctaaaaattagtataatcaaataaatcaggtgtcttacagaatacattttttacatgagataactctattgaatctctgtatcataccgttccaatctgatctgttttctttagcctaatacatgtctgcaattctggatattatttcacaatcattgtggaatgatttttggaacactgttccaaaccctaccttttggaacccctgctttctggagcctatctcttctctattgatttattacctcactttaatgaagaaaatccaccaaaaacttttgggtaaagtatctattagaggtaccattatttaagctagctacagttaagctggctattttattatagctggctgaatcttcattttatccatcataattgctggataatttgcttatggaatgtataggttaaatattatcttccactagatttttttttttttttgagatggagtctcgctctgtcatccaggctggagtgcagtgtctcactgtatcttcgacctcatgggttcaagtgattctcgtgccttagcctccagagtagctgggactacaggcatactccaccactcccaactaatttttctatttttggtagagatggggtttcaccatgttggccaggctagtctcaaactcctggcctcaagtgatctgcctggctcagcatctcaaagtgctgggattacaggcatgagtcaccatgcctggccccattagatttttaaatgcaatgtttcattctaacttccaatactacgtaattgaaaaagctgatattcatttgtcttgagatcctttacatattatttgttcttattgtggtggtagtgatggtgatgatctcttaggacacttttaggatatgctctttatccctgatgttttgcatttattttgatgtaaatttgtgtggagcagtttgcactcaatatgctaggcatttggtagaaacgttcaatcattcaatctggtaactgttggttttcaggccagtgaaattttcctgtattatattttgaacattcttctcccctcattcttcaattttggacattcttctattttgggaaattttacttattttgatattggaccttttggaggaggctttgttttccccgtttcttgtccagttagcatttatttttcaactttctgttatatgttctcaacattctctttaatctttccactattacatttttagttgcattattatattacaatgactgtttcttctgagttcattatttttctgtttcattgtgtgtttgctttgatctctttcatgtaaaaatctatctttaaatatgtgatgatcattggttccagatcataactaagaatgaactttaaagagtacgaaacaaaaactctgctttgcagttttgtatgttttggagtgaacttggtcaacaggtccactgcaccatagagtgggcaccgaactcatattgtcagcgtctctggttattatctcttatgctggcctgtctccccaaagaccaatctgccatctcctgcctgaggtgaggtgtttgtggaaggaaataacatggaaagtaacattttggtggcagacaagataaggagaactggggatatcattgttcattatttcgattttcaattgacctgaatgtttccagtaatatattgttttacttcttaatctttgcccagagcctttatggttaaccagagttaactcatccattcctttatcaggttgagggaggaagaattatttggcttcaatgggaaatgatttaggcacctaattattttttatattaacctgcatctaatttctcactgtttggacccatttctccccacttacttcagcactgcatggtatttctaatttttgattttcacgctcctgtactgtaaatccacttttatctttgtggttttacatagctaaccagtaggcattgtactttcaatgcttcctgcactttttttaaaatccgcttttcattgtaccaaatgctgtggacattactaatcaactaaatgcttctcttttttacgtgtctgtttatacatgtttgttttcttgggagatttagaagggaacaaagaaaatatataatttaatctactgtatattgctagaatccatgccctctcagtcctctctgtttcgttttctatccctattatctgaatcaatggttttcagcaaaggattctcattaaaaacacttttttttcctttcatgtgagatcgggacactttagttctatgtaacttagttatttgtatacacattcctagtaaacactgattctgactatctgttagttggttcaagtactgataatatgactataaatttgtaagtggatttacattttaacatatatctccacatgtatcattacacttgatactcccaacacctgttttgcttgcctaacagattttatacatcattcctctttctttgtaataaaatctcaatttagttctatatgattaaggaaggtagtccttccacagtcccaacaggtgaatgatgatggctaatctaagccaatcatggtccttctccttctctacagcaaatgtgttatccatgggtatgtgccacaaacctgataaacgaaaggagaggaaacatcctggagactactatagaataagcatgttattgtccctagtaaataaaattggaaaagatgacacaaatattcttgcctttggcccttgcacagagccagtgatggtggatgctgtaactgctatcttgagatcatggatagaaaaaccagtgaaattggaaggaagctgactagtagcctcaacattgacactactaaatccgtgaattctggaaatatttgctaccagactgattgttataggagataataagtatccatagtcctaacgctaaagtcagttgggtatttactccaaaatattctattgtatactgagaaccctcataatacttaaggagatacaatactaattgaagatatattactttcagtcatctcaatttgaatctgggggtattcaacctgatttaacctgattatcctgattatcctggattgaacatacagtacataggagccacccttatgtttcttagctatggttacctgctatttcttgataaagagcaatactgggttaatttaatgttgaaataaagagaagaagatattaagtgaatttgtgaaaaatattttttcagaactaataagagatacctttactatagctatttttaaaactggaatacaaaactcttttaccttagctgacacctgacaactattaaaatactagatgtcagttgctgtgtggtgggttttgtcatagtttttacttaattagctgtgtttattttattaaaatttctattatgtctacatcctgagaaagttctgtggctatgaagaggtgttgatatgttccgctgactctatgaactgttgagtgttgtgggtggggaacggaaggagaatgaaaaaagtgaagtactcccagctgtgaactgcttgaaccaaggcaccactccagtgccaggctcacaggaaaaatatctgaagaagttcttaaatgccatacagattcagtggaacgttttaaaaatcagacttttaaatgagacccaatcttattactctatacaccctttcaacaacagtgaaccactttgaacattctgtaaggtaaatcaatatttgttgttgtggttaagaatcctgaatttttatatggctttgtctatcactaataatcatgtcactgcattaacctgtatcaaataagacacacaacagagatatcttgatttctactctttaagagtttggctcttcagaagttttatgtatagaatgatctcagcagggcacagtggctcacacctgtaatcccagcactttgggaggccaaggcgggtggattacctgaggtcaggagtttgagaccagcctggccaacatggcaaaaccctgtcactattaaaaatacaaaaataagccgggagtggtggggcgtgcttgtaatccctgctactcaggaggctgaggcaaggagaattgcttgaacctgggaggcaggggttgcagtgagcagaggttgggccactgcacctccagcctgggtgacagagcgagactcggtctcaaataaataaataaataaataaaatagaatgatctcaacacaaacatcctaatgtttattacattctcactgaaaacaattttcataaagaactaagttttccaaaatgggtgcatgggcaaccttacacattatgccaatagctatatcattcactcatcattcttaaaaaaaatccattcaggggtattagttaataagccttttccatatttacaggctacctatccagagtctgataaagggacaaaaggcccctttccttcacaaacctataatctaatagaaaaggagttgttcctacctctgtggaactctcaatcagctagtgacaatagggcacagagcaagagcacgggtttatggaaagaattaagtttgggccaaaataaatccttaatggatttaaaagacaacttgatccttaagaatttccttcctagttcttctcatatttatccctctctgactccattgctcctctgttcactaaaacatttattggctcagttaataggtgccaagcattgttctaagtaatagggatagagcagtgtgcaagatcttgccaggtgcatactttgagagctggtaacctaacaagatgatagtcattaaacaactaattgcaaatgtgataagcattttgaaagtagtgagcccattcctagaggattttacaatgtgaaactaggaaggctgcctggagggaatgaattaagcagggcctagaaagaaaaggaagagaccccaagaccacttacgtttgtgatgtttcataagctccctattgttattatttaacatcactaaatgtgaatattcttaattatagtgtagatcataatgagtaagaggtccatattattcccccactgcttcactaaactttaaacagtttcttcttgaacataggctcctgacctcctgtgttttgttttgttttgttttgttgttttgagcatttctgtcactttgagatgtagatattctcccagtcacttgttagttttacgaccgaggaatggtctttcctaaggacctggaagccatctctttgaaatgtaatcattgagaaagctagtgcccctatctcccagtatctgtgggaaggtagaagcttaacttctataagggccaattaacacacccaagtggcccaataacattgaccaatgtcttttttttttttttttttttttttgagacgaagtctcgctctgtctcctgggctggagtgcagtggcgcgatctcagctcactgcaagctccgcctcccgggttcacgccattctcctgcctcagcctcccgagtagccaggactaccggtgcacaccaccacgcccggctaattttttgttattttagtagcgacagggtttcaccatgttaaccaggatggtctcgtatcctgacctcgtgatccgcctgccttagcctcccagagtgctgggattacaggcatgagccaccgcgcccggcctactatctctttttattggtcctctgctgtactgattatcaaatattttcaacaatagccacatacgtataatgtaacagtagctgaaatttcacaatttctctggatcctgcttctgccattatagcacaaaattcaaatgtaactgggatagataaatcactaaaattatgttcactatgatatgagcaattcattaaatcttgttttctttttgacgagaaagatataccaacaataaattattgggatgggaatagactgaagggaaaataattagagagggaaaaaaggtcagaaaaccaatcattatctttgtattcctcatgtcttgtgatatgtctggcaaatcgtaagaactcaaatattcatatgaatataagtgattaaatgaacacatgtatatgtaatttatacttgcctaagataaccattgtctcattcatacttgtgtctagaaatctcctgggaataatatctaattgttctattgctctagagagtgcttatttatagaattctttttagttctaattttcatttatatattaactgggattgcctctactttgatggctaaatactatgttttttatttccacttacctcatatcttgagaggaattaccaaaaagcttctgtttaactgatcttctctcatgatgatttactattccagttaactttccacctcattatttagaatttttttctctcttccactttctcttccttctcttccttatctcctccccctctttttttttcaattaagtcttaaagctattaggtaagaccacagcaaaggaggaagatggagccacagtagcttagaataaggtattagagctagagtgggtgagagggggtccatactgggggtgcttacagagacatgggatagaaagaataagagattgattgtattcgggtaaattgaacaaataagtaaataaattagggataatgggagctaactgtctcactgttgaaggaagttgtgaacatcaaaagctaaaaaactagaatacaccactagaaatgtggtgttgtgtttaaatcaaatataagagtgtgaattcatggttttaatagatagataatagatggataaatagatacatagatgaaagaaagattaaatagtaggtagataagtagatgaaggaaggtagatagatgatagataaatgggtaaatatatgtatctgtacactgacagggcctaggtacagtgatatccccaggtagataagcacatccagcaccagatattgttttctaaatatcattacctacctaaaaggaaccagggctccttgcagataatggctgatctcaggtcggggatgaagacaatattaaatgatcttgaaacatcttagtttgccaaaccacaaggttctaaaatattgttttttacatgtccaagaaacgaggtgccagaaggaaaagtctcctattgagcaaatgtaaggcgtatttacatcaaaataaataattggtataatggctgtggcattatcaaaaataaaatataaataaacaacataaataagattgtaatccagtgattaaaataggaatcctatgacttcatgctgatataaataaatatattaatatatcacaattttggtaaaaaacagcatgtttatacagcctcaaagtacctcctggaaagtaattaattttaaggaaaaaatgagtgtctttatagtataaaagcttggcagactctagggaagattgtcaaataatcaaagttaatatcaccagtaatggaacaggacaaaattaaattctgtaacacacgataggatctaaaacaaaacaaaatgaataaacagcatcacttcagtgatatttctgccatggtagaatatgaatataactattttaaaaaagcagacagacaaaccaaagtgagggacaagctacaaaataacagcttctacccttcaagaattttaatgatataaaagtcaaggaaagattgaagaactgttcccattgaagttgaagaagacaaaagggaccttgtgactaagtgcaaaatgtgttgccaaagccgatcttttttgctataaagggctcttattaggaaatctgtcaaaacttagatgaggtctgagaactacatggtgacagtacatctgagttagtctctttattttgatattaatacaaatgtgtattaattaagaaatgtgagagaatttgtgtttacaggaaataagcactaaatattccagagtgttgagagaacatggtaacttatctttaaatcattccaaaaaataaagttcctggtattatatttacatttctaaaaggttaggatttttttctaacgatttttaaaaagaatcacttgtagctggtctttcttcctgtctcctctaacataactaaacagtgtgacccagactgtcttcctttattcctctccccctgcttttaatgacatgtacaagccatttaggcatatataacttttaaatacaatttgaggacaacagcactggagtagagaaggggatatttcattgcagcacaatatgagagattcttgtaaaaatctccctagtcaaatgtctttggcagattttcttctaaattctgctggcctcctgctgaaaccctgtcccaccaggtcctccttactccttcttctctggctgttctcattctcccagtgcaggtattttttatatagatcaccatatgagcatgtcaagtcccaagctcattatggataccccagggtgcatacaaccaaacaaccatgctaagatgtgcttctaaagaaccctattccacaaaagaattctacagtttgctccccaaataacaagagctctctctttagtgttcactataaaatatagtaccatgcaataacacagtaaaaaatcgataacatgttgtcaaattaaattaatgagatttaaatgctgaagttggaatctttaccagtgcaacttttagaaacattttcaattcagacacacacagacttgttggaatggatgctcttttgtctgaacacacaatggaacaatcaatacatttattcagtgaatttgtgattttgtttataaactgagtaggccaggtgagataattaaaagtagtcaatcggatttttctaagctttactcacagatcatttagtatgtgaattaattcatctctggatatgctagttgcttaactttcacccttttagttaatgaaatgcatgtcatataattaataaagccatttctctcctgaatattgatatacttctaaatcatagatcaaagtttttgtagaaagcattcagaatatttaaagttttaggtagcactttttattcctagtgttagtacatgaaatattgtagacaatgaggcctttgcattcaatttgttagaataagagttctttaacttttgtttaaattaattcataagaacgttattcagtgcagtctgagtaccttggcagcattaagacacaacatcttctatatacagtttggaataattgtgaactaaaaattttaatactgttctgattttgtctatgatgtatcactatggttccttaacagttgcaattgcacagagcatttgagaagcaaaacaatctaagcgcctcaacttacaacaataatgagtacaacagtttgttgaagtagctgtaaatcaaatgttctgtagctattttttttaaaaaaagcccataagttatttggataggatcctttacttctgccacctaacagaagctctgcatacaaataaaaaggaagcatccatgttgtcttcaggttaaggtttgcccctgaaaagaaagatgttgtagattttttcctgaaacattgctgaagttcagcttcatctagtagaagccaaagcaggacaattacatcgtggatacactcaaaatcagttcattgttatgagaaactggagatcacagagaacaaatgaaattacatgccacaaaaatgagaaaatgtattttccacttccatgtttcttacctttaactcgctaaagattcttctttcacaaacaaaaaaataacaacaacaacaaaaaaaacaggtataacctagattccagtcacataatatgcaagtccttctttagaaataggttgggaagtgggttgatgtgagataaggaaatgactccaatgtcttcacgccctggtctatagttttaatatacagtttatgcatgtcttcaagtaggaacatggtcttaagtttaattacagatattttcttaggaaggatacataatcgagagccagaaattaatctaccatggaaaaaagcaaagtggtagacattaattttcagtcaaattaaatctgatagatttatttttggtgttatgttgttattgagtgagatgagatactttcctgtttgttttgaaaaggtattaattataattgacgagaaaattaagcccaacatattgccattcacatgatttgtcgaaaataatagaaactctcctatttgattatggagcgaaggcataaatttaggaaatacttaaataaaaatagtgatattcatgttaatgtgattaaatggcataaaaagtaatattcagttttcatctatgaggtcatggcacactagtagtgtcagggtgggtcaaacctgaagcaaagttacctgggaacgcctgagataatttaaccaggatagagcactggattcatcttggttgaggagtcaaaattatatgtagctggaaagacaataacaagcatcaaataaattattatatggcaggatgccagtcctactcaatggccctggaaaagtcttctatatagataagattctgggctaactttgaggaattcatgtatgtcttgagaaacatacatgtatgttttttgctatcatgtatggtggcttatcttagtagccattttatccgacaaacatttattgaaagcatactatatactaggcactacaaaaaataatagggatacaacagcaatcaaagtatacatgatctctgaccctcagagttaatggctaagtgggtgacattatccaaaggaaacagcattatagtaagatttgtgcaatgaatgtatagaggactgagactttatttagtcttaggaatgaagaagctttggttaataattctgctggtgcttgtttaaacttgactttgccagagtatacatgaagttttcatatgtttgccatttctatagtttttttatgtcagttaacttttgccatgtaacatactacactaagatacagggacttaaaacaactatttatttgctcacaattctatgggtcaataggtggttctattggtcttgagcaacttggctcatctctgctgtcaactgtcattttgtctgggtctaaaaattctcagatggccttattcacatgtctggacaatctgttaggattgttggaatgtccagaatgactagtctctttcttccaataggcaagcttgggcttgttcttatgctggcctaaggcttttcaacagcaagagagagcaggaccaaatttgcaagaactatttaagcctctgcttatatcaaattttccaatgccccaaagcaagcaatatggccacgctcagattcaaagggtagagaaatagactccttctattgctaggtggaggtacaaaaatattcgccactgcactttattgaagatggtgtgggcaaccttgctgtcacagaactgctttcgtgatgaaagttttcaacttcttcctgacttagaaccaatttttaattattaatattgactattaaagttcttcccctgttcttttccatttttatcttgttctccaccactgcctactattaaaacttcagccagaaagttctacaaattgacctttaaatccacttctgccaatgagatttgctcatcctttaagatttagcataactctatattaatgttctgatttttctcattactctgaataagaatgactttatggctccagacgaaactgcttatattcaaattgcctttaagggagttgcttactatagtttcctaaactcagaacagtgcctattccctgcagcacatatttttgctcttactgttaaacttatttggattttataaccacttcttaaatgtctattttgtctccctcaccagaaagcaagcctcttaaggaccaaagctatttcttttatgttttacccctcagtagactgtctttaagtccttaaatacatgtaaaattaaggtattatttcattttataaactatatgtttatggttttagttatgagaaatatgtaaaatgagatacatattaactttttgtttatcccaaaataattgaccattttccctgtttcaatttacaactaaggagcccaagagaataaagataatagattaggtagcttgaaagagtagagaatgaaaaatttgcaagatgtggaagttggccagatgttgacagatatggaattagtaaccaaaatatactttcaataaacatttgtatcggatgtgtcattttttttctcagcaaaatttttgcttcactcgcttctgacatctactgagtatctagaatggagcagctgctgtatctccaccaaaacaaatacagaatgtccgaagcaaaacagaaggtcaagcagtaaccctctgcaaagaagtgtaaactttctccatgtggatatcagtgttttctaattttttattgcatcctggcataaagatcttaaaaaataccagaaagcctgtttgaaaagggaacattagctaattttctccatactttatatataaatatccatcttatggatgtttggaaacatttgaagtcttggaaaattgctttcctttacatggtggtgtgtttagtattgaatagttatagctttgatatatacttttctttattttgataaatatatcctatttttcttcatttgactaagaatcccgaaatggaaagcaggtgatatgcatttctaattcaggcttttacacataattagctatgtgactcatctaagcctttgttgcccagtctataaaacagggacattaatgcccacccttgctactttatagagtaatgatgaccaaatcaaataatgcacatgaaaatgttttataacttggaaaatggaaggggtaattgcactagtgtatgatcatagcataatatctaagtatgttttttttctctctactcaaatttctcatttattacctagaccacgcaatattccactaattagctctgaaatctttgtcaagtcattcacctctctggatcacatttttctcatcatgaaaatgggggagatttactagataatatcaaggagggcttttccatattttaaaattctaagatcatctattttatttatttattttaatttgttgacatacggtctcactctgtcacccaggctggagtgaagtatcataatcatagctcattgcagccttgatcctgcaggctctagtgatcctcttgcctcaacctcctgagtagctgagactacaagcatgtgccaccacatctgggtaattttttttccattttaattaaagatgagttctcactatgttgcccaggtggtcttgaactcctaaactgaaaatattctcccacgttggcttctcaaagtgctggaattacagccatgagctaccatgcctggcctaacacaatatattttttcaaaatattggttatggcatgttgtttgaaaaaaaataggaagtaacatgagcctcctctcctttaattgatggtcattagcaagattttatgaaattccttcttggtatttttttaagtgtttattatgcaatggaataaagttaaagtcccttaagtcagttgttcgtacatcataatgtcctacttgaaagtttgcaatggcttcttattgcaattagattaaaattaaactctgtatgatggtttaaaagaccctttattactttgcttctgtctatgtgtaggtttttaaaaagtgatcccaaatttcttggtatttgtcccactgagagacagtgttctatatctctaccctatgaatctgaatgacttctttaaccaataaaatatgggtgaagtgatcctatgggacctcatagactaggttatcaaagatcatgttgcttatgcttagatcttgtgaaatacttactttgtgtatattatttttgggcctctcctcagaaatcagcctccatgctgtggaaagcccaagccacatgaagaggccacatgtttgtgctttggtcaacagtcccagtgggttccaagttttcccagtccaggtgccaggcaagagagtgaagaagactccaaatgattccaagaggttccagacatagtggagcagagataagtcatccttgctattctctggccaaaaccttgacccaatgacctgtgagcataacaaaatacttgttttacaccagtgactttgggtggggcttggttatatatctacaagttaccagatcaacacacctctctcaccctctccctcattcatctcttctagatatgctggattctcttagtctcttgtctatgaaaggattctcctatctggcacgtttgtgcttactgtgccctttaccaagcactttttccttccattaatgtgtggttgtctacttgtaatctttgatggtttagctaaatagctccttgtaagagaaattcattttctaaccaccctgcccaaaataacctccctacacaccatccaaaatgtttttagcagtctaaaattatctttattatctgtctgtgtgtttattacgtcttgctcctatagtatctgccatgtgagcagacactttcttctatcttattcacagtcacatacacagcacctgaaagacacttagagaataataaaacataatgaacataagcatatgtttgatagaggcttaaaacgtatattcttaggcccaaaactgaaattcaattttaaaagtctttaatgagatctgtactttgattttctttgttgttgttgctgttgcaaaaaaggcaagcttttattttattttattttattttattttatttttattatactttaagttctagagtacatgtgcacaatgtacaggtttgttacataggtatacatgtcccatgttggtttgctgcacccatcaactcatcatttacattaggtatttctcctaaagctatccttcccctagcccctcacccatcaacaggctccagagtgtgatgttcccctccctgtgtccatgtgttgtaattgttcagctcccacttatgagtgagaacatgtggtgtttggttttctgtccttgtgatattttgctgagaatgatgatttccagtttcatccatgtccctgcaaagaacatcaactcatccttttttatggctgcatagtgttccataatgtatatgtgccacattttctttatccagtctagtattgatagacatttgtattggttccaagtctttgctattgtgaatagtgccacgataaacgtatgtgcaagtgtctttatagtagcatgatttataatcctttgggtatattagtaatgggattgctaggtcaaatggtatttctagttctagatcctttaggaattgccacactgtcttccacaatggttgacctaatttacactcccaccaacagtgtaaaagcattcctatttctccacatcctctccagcatctgttgtgtcctgactttttaatcattgccattctaactgctgtgagatggtatctcattgtagttttgatttgcatttctctaatgagcagtgatgatgagcattttttcatctgtctgttggctgcataaatgaacttcttttgaaaagcatctgtccatatcctttgcccactttttgatggggttgtttgttttttccttgtaaatttgtttaagtgctttgtagattctgggtattagccctttgtcagatggatagattgcaaaaattttctgcgattctgtaggttgcctgttcactctgatgatagtttcttttgctgtgtagaagctctttagtttaattagatcccatttgtctattttggcttttgttgccattgcttttggtgttttagtcatgaaggctttgcccatgcctgtgtcctgaatggtattgcctaggttttcttctagtgtttttatggtcttaggtcttacatttaagtctttaatccatcttgagttaatttttgtatatggtgtaaggaagggatccagtttcagctttctacgtatggctagccagttttcccaacaccatttattaaatagggaatcatttccccattgcttgtttttgccaggtttgtcaaagatcagatggttgtagctgtgtggtgttatttctgagggctctgtactgttccactggtctatatgtctattttggtaccagtaccatgctgttttggttactgtagccttgtagtgtagtttgaagtcaggtagcatgatgcctctagctttgctctttttgcttaggattatcttggctatgtaggctctttttggttccatatgaaccttaaagtagtattttccaattctatgaagaaagtcagtggcagcttgatggggatagcattgaatctataaattaccttgggcaggtaggccattttcaagatattggttcttcctatccatgagcatagaatgttctttcatttgtttgtgtcctcttttatttcgttgagcagtggtttgtagttctccttgaagaggtccttcacatcccttgtaagttggattcctaggtattttattctctttctagcaattgtgaatgacagttcactcataatttggctgtgtctgttcttggtgtataggaatgcttgtgatttttgcacattaactttatatttgagactttgctgaagttgcttatcagcttaaggagatttggggctgagacaatggggttttctaaatatacaatcatgtcctctgcaaacaaagacaatttcacttcctgttttcctaatcaaataccctttatttctttctcttgtctgattgccctggccagttgtcttttgccggttttcaaagggaatgcttccagtttttgcccattcagtatgatattagctgtgggtttatcataaatagctcttattattttgagttatgttccatcaatacctagtttattgagagtttttagcatgaaagtctgttgaattttgtctaaggccttttctgcatctattgagataatcatgtggtttctgtcattggttctgtttatgtgatggattacgcttattgatttgtgtatgttgacccagccttgcatcccagggatgaagccgatgtgatcatggtggataagttttttgatgtgctgctggattcaggttgccagcattttattgaggattttcttatcgatggtcatcagggatattggcctaaaattctctttttttgttgtgtctctgccaggctttggtattagggtgatgctggcctcataaaatcagttagggaggattccctctatttctattgactggaatagtttcagaaggaatggtaccagctcctctttgtacctctggaaaaattcggccgtgaatccatctggtcctgaactttttttggttggtaggctactaattattgcctcaatttcagaatctgttattggtctattcagagattcaacttcttcctagtttagtcttgggagggtgtatatgtctaggaattatccatatcttccagattttctagtttctttgtatagaggtgtttatagtatcctctgatggtagtttgtatttctgtgggatcagtgatgatatcccctttatcattttttattgcatctattggattcttccctcttttcttctttattagtcttgccagcaatctattttgttgatcttttcagaaaaccagctcctggattcattgattttttgaagggttttttgtgtctctatctccttcagttttgctctgatgttagttattttttgcctgctgctagcttttgaatttgtttgctcttgcttctctagttcttttaattgtggtgttagggtgtcaactttagatctttcctgctttctcttgtgggaatttggtgctgtaaatttccctctacatactgctttaaatgtgtcccagaaattctggtacattgtgtcttcattctcagtggcttcaaagacatctttatttctgccttcatttctttaattacccagtagccattcaagagcagattacacagattccctgtagttgtgtggttttgaatgagtttcttaatcctgagttctaattgattgcactgtgatctgagagacagtttgttataatttctgttcttttactttttctgaggagtgttttacttctaatcatacggtcaattatagaataagtgtgatgtggtgctgagaagaatgtatattctgttgatttggggtgtagagttctgtagatgtctattaggtctgcttggtccagagctgaattcaaatcttggatatccttgttaattttctgtctcattaatctgtctaatattgacagtggggtgttaaagtttctaattattattgtgtgggagtctaagtctctttgtaggtctctaagaactagctttatgaatctgggtgctccagtattgggtgcatatatatttaggacagttagctcttcttgttgaattgatccctttaccattatgtaatggccttctttgtctcttttgatctttgttggtttaatgtctgctttattagagacaaggattgcaacccctgctttttttagctttccatttgcttggtagatattcctccatccctttattttgagcctatatgtgtctttgcacatgacatggatcccttgaatacagcacactgatgggtcttaattctatccaatttgctggtctgtgtcatttaattagggtatttaacccatttacatttaaggttaatattgttatgtgtgaatttaaacctgtcattacggtactagctggttatttcacccgttaattgattcagtttcttcatagcattgatggtctttaccatttagcatgcttttgcaggggctggtaccagttgttcctttccatgtttagtgcttccttcaagagctcttgtaaggggggcctggtggtaacaaaatctctcagcatttgcatattatttcttcttcatttatgaagcttagtttggctggatatgaaattctgggttgaaaattcttttctttaagaatgtcgaatattgaccaccactctcttccggcttgtagggtttctgctgagagatctgctgttagtctgatgggcttccctttgtgggtaacctgactttcctttctggctgcccttaacattttttccttcatttcggcctgggtgaatctgtcagttatatgtcttgaggttgttcttcttgaggagtatctctgtggtgtcctctgtattttctgaatttgaatgttggcctgccttgctaggttagggaagttctcctggataatatcctgaagagtatttttttatcttggttccattctccccatcactttccggtacaccaatcaaacgtatatttggtcttttcacatagtcccatatttcttggaggctttgttcatttcttttcactcttttttctctaatcttgtcttctcactttatttcattaatttgatcttcaatcactgacgtcctttcttctgcttgatcaagtcagctgttgaagcttgtgtatgcttcccaatgttcttgtactaaggttatcagatccatcgggtcatttaagctcttttctacactaattattctagttagccatttgtctaaccttttttcaaggtttttagcttccttgtgatgagttagaacatgctcctttagcttggagaagttggttattaccgaccttctgaagcctacttctgtcaactcatcaaactcattatccgtccagttttattccctgctggcgaggagttgagttcctttggaggagaaaaggtgctctggtttttggaattttcagcctttctgctctggtttctccccatctttgtggttttatctacctttggtctttgatgttggtgacctatggatggggttttggtgtggatatcctttttgttgatgttgatgctattcttttctctttgttagtttttgttctaacagacaagcacctcatctgcaggtctgttggagtttgctggaggtccacttcagtccttgtttgcctgggtatcagcaatggaggctgtagaacagaaaacattgctgcctgatccttcctctggaagcttcatcctggaggggcacctgcctgtgtgatgtgtctgtcggcccctactgggaggtgtctcccagtcaggctacatgggggtcagggacccacttgaggaggcagtctgtccattactggagcttgaatgccatgctgagagaaccacagctttctccagagctgtcagacagggaagtttaagtctgcagaagctgtctgctgccttttgtacagatatgctctgcccccagaggtggaatctagagaggaaataggccttgctgagctgcagtggggtccaccaaattcgagctttcctgctgctttgtttacactgtgagcatagaaccacctactcaagcctcagcaatggtggacgcccctccccccaccaagctccagcatcccaggttgatctccgactgctgtgctagcagtgagcaaggctccttgggcgtgggacctgctgagccaggcatgggagggaatctcctggtctgctggttgcgaagaccgtgggaaaagtgcagtatttgggcagaggtgtactgttcctccaggtacattcactcatggcttccttaggctacgaaagagaaatcccctgaatctttgtgcttcctgcatgaggcgatgtcccaccatgctttggctcaccctccgtgggctgcacccactctccaacccatcccaatgagatgaaccgggtgcctcagttggaaatgcagaaatcacccgtcttctgcattgatcttgctgggagctgtagactagagctcttcttattcagccatcttggaagtgacctgtactttgaatttctaacatttaacccaggttattccaaagcaagtgtactgtggacattgtgacagtactttctttatacatatgaccattttcttataaaacaatagtatgagacaatatattgcaatctagaaaatgctatataatgaattcctgatagaattagtaatacctatttttattgaattaggataaattatcacaggaaaatataactaataaagaaaatttcactatgtctcttctagtgtcactactgattcatctatgcttttatattaattttcctgcagttataattgatactatgaattaaaaaatgattcctatctttagttcaacaattctctttctctttttacttaaatctagttcttacttttatattcctctcaaattgagtataatattctaggctttattgctactcccctgtatttggcatatatatgtgtgtgtgtatatgtgtatatataattgatcagacagtacagagagtttccgtataaactcacccccaaatatagtttatcctattattaatattctgtatttgtgttgtacatttgttaaaattaatgaactaatattgatccattattattaactaaagttcacagtttacattaagattcatactgtgtgtgttttaaattctatggatttttgaccaatacataatgtcatgtatccacctttatagtggcatacagattagtttagtcaccctaaaaactccctgtgcttcacttgttcattcctccccagatcctttccaaacacctggcaaccaccaatctttttattgtcttgatagctatgcctttttcataattttatttagttgaaatcatatagtatgtagccttttcaaactagtttatttcatttaacaattaagtttcctctatgtcttttggtggcttgatagctcacttctttttacttctgaataatgttccattggatagatgtaccctgagtttattaattccttgagtttattgattccttaaaggacaccttgtttgtttccagcttttagaatttatgaataaagctcctctaaacatttgtgtgcaggtttgtattttgtatatatttattgtaagttactattgttttctaattaggcttcctgtgtccattgtttgaacaattacaattattcatttgttccaaggtgatgtctcagagatataaacctgttgctgtcaccattctgctgaaagccttaaggatgtactcagttaagttcaaatattaacgtgacatacaggaattcgtcattttattgtggttcactctatgtttttgtaaattgaaggtttgtggcaatcctgtgtccaggaagtttgtggtgccattttttgtaacagcatgtgcttactttgtttctgtgtcacaatttggtaattgtcacaatatttcaaatttttcattattattatatctattacagtgatctgtgaccagtggtctttgatgttactactgtaattgttttggggcaccatgacccttgcccatataaaaagcaaaattaatcgatgagcgttgtgtgtatcctaactgttccaccaacaggctgttccccatctctctccttattcttgggcctctctattccttgagatacaataatattgaaattatgccaattaataaccctactatggcttctaagtgtgttccagtgaatacacaaatgataaaaaagtaaaaacagtcttattgctgatgtggagaaagttttagtactctggataaaagaaaaaccagccacatttccttaagagaaagtctaatccacagcaagaccctaactctctttaattctacaaaggctgagagagatgaggaagcggccaaagaaaagtttgaagctagcagaagttgtttcctaaggtttaaggaaacaagctatctccataacataaaagtgcaaggtgaagcagcaagtactaatatagaagttgtaggaagttatacagaaggtctactaagatcttctgtaggtgatgaaggtggctacactaaacaatagattttcaatgtagacaaaacatctaggacttttgtagctagatagaagaagtcgatgcctggcttcccccaaaggataggctaactttcttgtttggggctaatgcagctggtcactctaagttgaagcccatgctcacctactattctaaaaatcctatgtccttaagaattatgcagaagcctactcttcttgtgctctataaacggaacaacaaagcccagatgatagcacatgtttacagcacgatttactgaacattttaagcccactggcttaaaagtagttgatacctgctactatgaaaagaagattcctttcaaaatattacagctcattgtcaatacacctagtcacccaaaggtgctctgatgaagatgtacaaggagattaatgttgttttcatgcctagtaacacagcattcattctgaagtccatgaatcaagcagtaattttaactttcaagttttttaatttaagaaatatattttgtaaggctataggtgtcatagataatgattctgcagatgaatctgggcaaagtaaactgaaaatcttctagaaatgattcatccttctaaatgacattaagaacattcatgattcatgagaggaggtcaaaatatcaacattaaatagagtttagaagttgatttcaaccattatggtgaatgattttgtgaggcgttcaagactttactggaggaagtaactgcagatatggtagaaatattaagattactagaataacaaatggagcctgaagatatgactgaatcactgcaattttataataaaccttgaaaagatgagaacttacgtcttatgaatgaacaaagaatgtgatttcttgagatgaaatctgctggtgaagatgctgtgaacattgtttaaatgacaaccacaaaaattgaaatattatataatttagttgacgaagcagcagtagggtttgaggagactggctccaattttgaaagaagtttgcatcctacgaagaaacttttagtaaaagggagagttactatcgatgaagcaaacttcattgttgtcttattttaagaaaatgccaggccagacatggtggcttatgcctgtaataccagcactttgggaggccaaggcaggtggatcacctgaggtcaggagtatgagaccagcctggtcaacatggtgaaaccccgtctctactaaaaatacaaaaattagctgggtgtggtggtgcatgcctataatcccagctactcaggaggctgaggcaggagaattgtttgaacttgggaggcagagattgcagtgagtcaagatcgcaccactgcactccagcctgggggacaaagcgagaatccaaaaaaaaaaaaaaaaagaaaggaaaggagaggaaaggagaagggaggggaggggaggggaggggaggggaggggagtgagagagagagagagagagtgaaaggaaggaaggaaggaaggaaggaagaaaggaagaagaaattgctactcatagttgcctagacattcagcaatcacccctctgatcaatcagtagccatcaaccttaagacaagacctttcaccagcaaaaggatttcacctcactaaaggctcagaggatcattaactttttttttagcaataaagtatttttaactaaagtaaggtatgtacatgttttacataatcccattacacatttagtagactacaataaacttaaacataacttctgtatgcactgtgaaacaaaataatacatgtaacttgctttattgcaatatttactttattgcagtggcatggaactgaactaacaatatctcttaggtatgcctgtaaacagctttttaatcatcacattccagaggatctctctgaagttacactatgccatcatgctgtacataccctctgcccttcagacttagtaaaacacctatcttcccagttatagatcttatgcctatggaatttgctgatctctgggccaagaaagcccttcttcatcttgtcagcctcttgaattcctattcaaacacccttctcccattgatatctcggtcaactcccaaaataacccgtctcctctacatccttagagctctagtagcataagtccatgatagtatccactgcagtacacagtagaaatttcttcttctgtctctgtccctccctggattttggaggcagcttttatgttcatgatagtctgcttagattggaaagcaaatcacgagattttgtaagttacactggatgcatcagcagacaagcctttgagttccagctttgccacttactagcttgtcccacaagctcttgcaagtcaaccaatgcttcagaactctattttttgttttaaaaatttaaagtattctctgtttcacataattactgcaaatattagtgtctgcagatttttaactataaaatgctgaacatataaaaagttttcaatagatttgcaagtacaaaaccttaaagttatcattattaacagtgtaactccctcaaaaatcacaaatcatttacagtcatgaaatgtaaatagctataactgttgtaagaaggaatttcatgcaatctttaatttgacaaatgaggaaatctttgtcttaataggttaaatgggttgcctaagatcacgcagcaatgacacagtcgaattgtaggcagaatttatcatagccacagggttatagatgaggacttgttacattacaatgggataaatcttgaaaatcactgaagctgaagaatatttttaaattatctaccatatttataacttaagatgcaaatttactcttacaagaagatttaatcccaataagaaattcaactttatattttttattaatctgaccatagacaacacttgatcttctatcagagtcatttctgataaagtggatagattactaagattgagaaattgtcgtttaggaataatatattataacaaatatacatattacatacatattacaaactttgaaccatagagtattccagacctttaaacagctctaccaccacccccatctatgtccattcatctgttttatcttttaaattaagaccctgattcgtattgcaaattaaatattccacaggtggtaagcactttcaaaggcagagggatcaaaatggaaaatgaggggcaaaaaacagaggaaatatagtcttacaaaattattttattaatataggggaaaacaaaatcaattcctatttaaaactcatgccagccacttctgtccataagaaaaatcatataaattttctcctgagttgatagagcaatgtttaaagacatatattgatggtttacggtggttgagatttcagatatgatgtgagaggattgaggacaactgataggaagagaagagaggagtgcactgggagagagaagctcagaaacatgcgggagggatgacattttatttctagagcaggttgggatgaggttaaagctgggacagagaacagaagatccataagacaagagacttgagagagagcaaagaatttaacagaacaaaaatcaatcaatcaatcaatcaatttccgaacatgagttagtgaggtgacaagtcctctatttgtccctggacttccttggagtgaggctcatgctctgccatagatgatattctggttcaaaacactcctgcttaaatcttgaaagacaagttgatgtaatacttaaaagtcatcattagttttttcatgacaatatttttctgtatttttaacctatctgtcgtgttatacataatgatcatttttttgtaaagagcatatagttgggtcttgccttgttcacaggctgataatctcttccttttaattaaagtgttttatctatttatacttgatataaatagtgttctggttggatataagactaccttattgctaattattttctatttgaaacacctatccttgtttcaagttttcttcctttcttgccatcttttggattaaatgtgtatttgattaggattccattttagctctccaattgacttttttgttagtatttgctctgaagatggcaatatgttcttgtaacttatcatcatatgcaataaattagagagtttcggtatgagtgacaaacttgtcaccttatagaagaaggcaacgtgaatgagctaacattctaggaataggttattttaattatgctttgctttctgtaatatacaaattccagatttcactggatatattaatctgtagcatatcaatgtatactatcaataatttgtgaatattataatggtataatttaattaaatatgaattcaattccatttttttgccattttggaatacacttaccttgtacacatgttttaaacccaaaagtatatttttttagtttaaataattatctaaaataaatgaagaagagaaaaatatacatcctttctatttagctacaaattctccagttctggatctcttcatttctatgtgtaaatcatttttctcaaagattttcttaaacattccgtatggtccagatatgttggtaataaaggctcatagcattcacctgcaaatgtcttcatttcacttttatttttggaggatgtcaataatgtatatagaattctagattaaaaattgtaatttttttctttcaacatattaaaaaatattgatgtgttgaataatagcttgcattctgatgagaaaccattggacattcttatcactttccccagagtataatgtgaatgtttatattgatttttattctggtttttagttataatttattagcttcatttcttaatcttattgtttagatgtattagttggaactccaatgtcttagttggaatcttagtgttctttttcctcttaggctttaaaatgtattgctttatttttagttctcaaaaaaaactatgatgtgtctaagtattgtgtgtgtttgcttattctgcttgattttgcttgacttcttagtttcgtgagctaatacttttcatcacaatttgaaaatttgttttcaattattttttaaatattttgtgtcccaatttcttttacttttcttctaactccaattatacatataatatttgatatgttcctgaagactattcaggtttttttcagtcttttgtatttctaaaacattggtttggatagtctatattacttattttcaagttcaaattctttaagtttaataatcttttattctctggtctcccatctattgttaaggccagctggtaaactgttcattttagattttacatttttcaggtctagagattttatttctctgctgatatttcctatccaattatttattatattcatgctttctgtaaaatttgtaaatatatttttgatgtgttttattttattttattttattttcaacttttgtgttaaattcagtgggtacatgtgcaggtttgttacctggataaattgcatcatgctgaggtttggagtacaaaggatcccatcacccaggtactgactgagcctagtacccaatagttagctgtttgacccttttcctactccatccctccctttttagtagtcgccagtgtctattgttgccatctttatgtccatgagcattcaatatttagaccctatttacaagtgagaacatgaattatttgattttctgtttctgcattaatttgcttaggaaaatggcctccagtttcattcatgtggctgcaaagaacataactttatttttttaatggctgtgtagtatttcattgtgcgtatgtactatattttcttcatccacttcaccattcataggcacttaggttgattctatgtttttgctcttgtaaatagtgctctgatgaccatgagagcacatgtctttttggtagaacagtttgtttccatttgcatattaaattagtctgttttcacattgctataaagaaatacctgagactgggtaatgtataagaaaggaagattaattggctcacagttctgcaggctgtatagaaagtgtagtggtttctgcttctgggaggcctgaggaagcgtccaaacatggagtaaggagaagggagagcagacattttatatggcagaagcaggagcaagacagagagaagtgggggaggtgctatgcacttttataaaactagatctcatgagaagtcactcactatcatgagaacagcaccaaaggattggtgcaaaatcattcatgggaaattcccccccattaacaaatcacctcccacaaggcaccacttccaataattggaattacaattcaacatgagatttgggcaggaacacagatccaaaccatatcagatatatacccagtaatggtatataatgctggatcgaatggtagctctgttttaagttctttgagaaatttccaaatttatttccaccgtggtttgccacttagaaatttcttctgctggataccctaaatcatctctctcaagttcaaatttccacagatctctagggcagaggcaaaatgctgccagtctctttgctaaagcataagaagagtcacctttcctccagttcccaacaagttcctcatctccatctgagaccacttcagcctggacttcattgtccatatcactataaggatttgggtcaaaaccattcaacaaatctctaagaagtcccagactttcccacatcttcatgtcttcttctgagccctccaaactgttccaacctctgcctgttatgtggttccaaagtcacttccacattttcaggtatctttatggcagcaccccatgctctgttgtattaatttactgtattagtctgttctcacactgctaacaatcacatacccaagactgggcaatttttaaaataaagaggcttaattgactcacagttcatcatgtctggggaggtctcaggaaatttacaatcatgtcagaaggggaagaaaacacatccttcttcacgtagcagcaggaaggagaagcaccgagcaaaagaaggaaaaaccccttataaaaccatcaggtctcatgagaactcactcactatcacaagaacagcatgagggtaaccacccccatggttaaattacttcccaccaggaccctcccatgacatgtgaggattatgggaattacaattcgagatgagatttgggtagggacacagccaaactatatcaatcaccctgagcattaaatgctcaatattttatagaagcatcaagaccattcctatgcagatttctgaggccccttctctgtgtagcttattttttctggtagcctgaatataggtttcctcagtaactccaaattctgatatctgtcttcttagcttagccatatcctctactcaacatatattctacttcgctgagcttccaagagcctccaggaagaaaactagtgcaactgtagagctcacttcatgtgtttcccttgtctctggaatcacattcctatgctaactgtccgatgtctgaaaccagtggcctttatacattttgtcatgatttggagttgtttattgtgggagaatcaatgtggagccaggaacttcatcatgcctgtaaaataatgtcctaaagctgctctttcttatcactttacttatctcaggacctttgtaaagtttaaacaacgacaacaacaaatacttgtttcctttatgtcaaggccgttttgttgataaacatacaaacctcttcgtttactgatctttcactctcatttatttttaaaaaaataaaagaaaatcccctggtttgcaggctcttctttgccctctgtgttatcaaaatcttaagaaacttcaaggtccatatggtgacatatacaacattctgatcttcagttctctgatttgtttttgtacagttgctttctatttgttttcaggtctatgactcacttttataacttctctccaggtttgccatcacttgaaatatattttatctcttatgtcataaattcaggcacctactacttcaaccacaacctcctatttatttgctaacctatccccaggtcttcaatcatttaacttccttaggacctccagcacacacatacatatccatgtcctttctaccctctccttttgactaaatctcctatgctgtgtatccacttcaataacgttcttgctaatattctcagaaacctcatttatttgacttgtcatactctaccttaccctcccctcccctaacccccctaaacaaaacatgacactcagttttcatctatctgccttctctgcaccaagatgctaaacatagtacagaaatagcaccctactcagattggtgccactaaaatttgtgattctcaacatcccatgagacttaaactttcataaaacttccgtgtttctttagccatgtttctcttttgtttaccacagaaactattacgttggtgcgaatgtagttgcggtttttgccattaactagatctcacgagaagtcaaaagtaatggcaaaaaccacaattatgtttgcaccaacctaaatatatcaaatacacctaattatttctaatgcctgacaccttcactcactgtcgaatactcagccaatgtcctttctttgaatagaagtcattacttgaaaaatatttctatttccttgaatcaaacagatcaacatcagtacccatcttatccatctcttctgcaacaacggaatgggtaatgtgtcccttctcctgccaaagtttcatcaccccacccatgatctggactgtgaacacttttcttttttctttgagatggagcttcactttgttatccaggccggagtgcagtggcacaatcttggctcactgtaacctcgcctcccgagtttaagcaattctcctgcctcagcctcctgagtagctgggattacagatgtgcaccaccacggccagctcttttttgtatttttagtagagttggggtttcaccatgttggccaggctggtttcaaactcctgacctcgtgatctgcccgccttagcctcccaaagtgctgggattacaggtgtgagcgaccgcgtctggcctgtgaaccgttttcttgatctctctgtctcttcaaagattccccttctactggcttctttccattagcatgtataacacatatattcaaatctatttttccataagtctctcttgacatcaggtccccctaacactatttctcttttctgtctcatagagaatctctacagccagactgtccaagttcatattccagatttgccacttactagctgattactattaatgtaacctttaacaactcatccagcctaaatgtgatttcctcctctgtaatattaatacctatctcataacttagactaaattgtaatatatgtgaagcatttgaaaatgcctagaaaatcaaatgctaaataagtattggatatagtgatacatattattattgtttaagtgaaattttctggaacaagtattcatacaagttatatagtcgttcttattttctgattattactcagcactcagatatctggcagctgtgtcaaatgttcagtgaaatgttcttgccaagacattgccaaatccaagagatatttctcagtttttcttatctgacttttgccagcatttcacattgctgatcatttcctagttgctgtaacatcccattttcctgatctctgtggaattattctctctgggatgtcttctaccctttgggtgttccttcttactatattttgcaatttttttcttctttttctttttttgctttcattttaagtgttaactgtcttaaatgccaggattttccggagttctcttttagattctcttctcactctacacattgttcctgatctcatttctcctggtgttttcaatatacttgctgattatttttttaaaaatctctgtcttcagcaaaaatctatctcctgagcacccaatcaatttagctactaaaatctccatggggatcttagattcaacacatataaaatgtaacccatctaagttgcttccaagatggccaaataggaacagctccagtctgcagctcacagcgagattgacgcagaacatgggtgatttctacatttccaactgaggtacctggttcatctcattgagactggttggacggtgggtgcagcccatggaagatgagctgaagcaggatggggtgtcgcctcacccagaaggcacaaggggttgggggatttcccttttctagccaagggaagttgtgacagactgtatctggagaaatggtacactcctgaccaaatactgcactattcccacagtcttagcaactggcagaccaagggataccttcccatgcctggctcagtgggtcccacgcccacagagccttgctcactgccagcgtggcagtctgacatcaacctgaaatgctgcagctggatgggggaggggtgtccaccattgctgaggcttgagtagctcacagtgtaaacaaagaggcctggaagcatgaagcgggtggaggcccctgcagctcagcaaggcctagtgcctttatagattccacctctgggggcagggcataggagaagaagaggcagcagacaccttctgcagacttaaacgtccctgtctgacagctctgaagagagcagtggttctctcagcatggtgctcgacctccaataatggacagactacctcctcaagcaagaccctgatccccatgtagggtgactgggaaaaacctcccagccggagccaacagacacctcaaacaggtgggtgctcttctgggatgaagcttccagaggaaggataaggcagcaatatttgctcttctgcagcctctgctgatgatatcctggcaaacagggtctggagtgcaactccagcaaactccaacatacctgcagctgaggggtctgattgttagaaggaaaactaacaaacagaaaggaatagtatcaacatcaacaaaaaggacatccacaccaaaaccccatctgtaggtcaccagcatgaaagaccaaaagtagataaatccacaaaggtggggagaaaacagagcagaagagctgaaaattccaaaaaatagagcacctcttctcctccaaaggatttcagcgcctcgccagcaagggaacaaaactagatggagaatgagtttgatgagttgacagaagtaggcttcagaaggtcggtaataacaaacacctctgagctctaacccatcacaaggaagctaaaaacctggaaaaaaggttagacaaatggctaactagaataaatagtgtagagaagaccttaaatgacctcatggagctgaaaaccatggcatgagaacttcatgaaacatgcacaagcttcaacagccgatttgatcaagtggaaaaaaggatatcagtgattgaagatcatattaatgaaataaagtgagaagacaagattagggaaaaaagagtgaacagaaataaacaaagcctccaagaaatattggactacgtgaaaagaccaaatctacatttcattggtgtgccagaaagtgatggggagaatggaaccaagttggaaaacactcttcaggatattatccaggagaacttccccaacctagcaaggctggccaatattcaaattcaggaaatacagagaacaccacagagatacttctcaagaagagcaaccccaagacacataattgtcagattcaccaaggttgaaatgaggaaaacatgttaagggcagccagagagaaaggtcgagttacccacaaagggaagcccatcagactaacagtagatctcttggcaggaaccctacaagccagaagagaaaggggaccaatattcaacattcttaaagaaagaattttcaacccagaatctcatatccagctaaactaagcttcataagtgaaggagaaataaaatcctttacagacaagcaaatgttgactgattttgtcaccaccacaccttattagaactcctgaaggaagcactaaacatggaaaggaacaattggtaccagccactgcaaaaacatgccaaatggtaaagaccacagatgctctgaagaacctgcatcaattaacaggcaaaataaccagctaacatcataatgacaggatcaaattcacacataacagtattaaccttaaatgttaatgggctaaatgccccaattaaaagacacagactgtcaaattggatagagtcaagattcattggtgtgctgtattcaggagacccatctcacttgcagagacacacataggctcaaaataaagggatggaggaatatctaccaagcaaatggaaagcaaaaaaagcaggggttccaattctagtctctgataaaacacactttaaactgacaaagatcagaagagataaagaaggccactacataatggtaaagggatcaattcaacaagaagagctaactaccctaaatatatatgcacccaataccagagcacccagattcataaagcaagtccttaaagacctacaaagagatttagactcccatacaataataatgggagactttaacacccctctgtcaatattagacagatcaacaagacaggaggttaacaagaatatccaggacttgaactcagctgtggaccaagcagacctaatagacatctacagaactctacaccccaaagcaacagaatatacattcttcttggcaccacattgcacttattctaaaattgaccacataatcagtagtaaaatgctcctcagcaaatgtgaaagagcagaaatcacaacaaactgtttctcagactacagtgcaatcaaattataactcaggatcaagaaactcactcaaaactgcacaactacatggaaactgaacaacctgctctgaatgactgctggatggataacaaaatgaaggcagaaataaagatgttatttgaaaccaatgagaacaaagacacaatgtaacagaatctctgggacacatttaacgcagtgtgtagagggaaatttatagcactaaatgcccacaagagaaagcaggaaagatctaaaattgacaccctaacatcacaattaaaagaattagagaagcaagagcaaacacattcaaaagctagcagaaggcaagtaataactaagatcagagcagaactgaaggaaatagagacacacacaaaaaaacccttcaaaaaatcagtgaatccaggagttggtttttagaaaagatcaacaaaatagatagactgctgacaagactaataaagaagaaaagagagaagaatcaaatagatgcaataaaaaatgataaaggggatatcaccacagaaacacaaactaccatcagagaatactataaacacttctacacaaataaactagaaaatctagaagaaatggataaattaatggatacatacacccttccaagactaaaccaggaagaagttgaatccctgaatggaccaatagcaggttctgaaattgaggcaataattaatagcctaccaaccaaaaaagtccaggaccagacagattcacagctgaattctaccagaggaacaacaagaagctggtaccattccttctgaaatgatttcaatcaatagaaaaagagggaattatccataactcattttatgagactagcatcatcctgataccaaagcctggtagagataaaacaaaaaaaaagatcattttaggcctatatccctgatgaccattgatgcgaaaatcctcaataaaatactggcaaaccgaatccagcagcacatcaacaagcttatccaacacgatcaattcggcttcatccattggatgcaaggcttgttcaacatacacaaatcaataaatgtaatccatcatataaacagaaccaatgacaaaaactgcatgattatctcaatagatgcagaaaaagcctttgacaaaattcaacagcccttcatgctaaaaacactcaataaactaggtattgatggaacgtatctcaaaatagtaagagctatttatgacaaacccacagccaatatcagactgaatggacaaaaacaggaagcattccctttgaaaaccagcacaagacaaggatgccctctctcaccactcctgttcaacatagcgttggaatttctggctagggcaatcaagtaagagaaagaaataaagagtattcaattaggaagagaggaagtcaaattttctctgtttgcagatgacatgattgtacatctacaaaaccccatcatctcagcccaaaatctccttaagctgataagcaacttcagcagagtctcaggatacaaaatcaatgtgcaaaaatcacaagcattcctatacaccaataatagacaaacagagagccaaatcacaggtgaactcccattcataattgctacaaagagaataaaatacctaggaatccatcttacaagggatgtaaaggacctcttcaaggagaagtacaaaccactgctcaacaaaataaaagaggacacaaacaaatgaaagaacattccatgctcatggataggaagaatcaatattgtgaaaatggccatactgcccaaagtaatttatagattcaatgctatccctatcaagctaccactgactttcttcatagaattggaaaaaactaaaattcatatggaaccataaaagagcctgtatagccaaaataattctaagcaaaaagaacaaagctggaggcatcacactatctgacttcaaactatactacaaggctacagtaaccaaaatagcatggtactgttagcaaaacagatatatagactaatggaacagaaaataggcctcagaaataacaccaaacatctacaaccatctgatctttgacaaacctgacaaaaacaagaaatggggaaaggattccctatttaattaatggtgttgggaaaactggctagccataggtagaaagctgaaactggatcccttctttacactttatacaaaaattaacttgagatggattaaagacttaaatgtaagacctaaaaccataaaaatcctagaagaaaacctaggcaataccattcaggacacaggcgtgggcaaaggcttcatgactcaaacaccaaaagcaatggcaacaaaagccaaaataggcaaatgggatctacttaaactaaagagcttctgcacagcaaaagaaactatcatcagagtgaacaggcaacctacagaatgggagaaaatttttgcaatctaccgctctgccaaagggctaatatccagaatctacaaagaacttaaacaaatttacaagaataaaatgaacgaccccatcaaaaagtgagcaaagtatatgaacagacacttctcaaaagaagacatttatgcagccaacagacatatgaaaaatgcttatcatcactggtcattagagaaatgcaaatcaaaaccacaatgagatatcatctcatgccagttagaatgtgatcattaaaaagtcaggaaacaacagatgctggagaggatgtggaaaagtaggaacgcttttacacagttggtgggagtgtaaattaggtcaaccattgtggaagacagtgtggctagaaccagaaatagcatttgacccagcaatcccattactggtcatatacccaaaggattataaatcattctacgataaagacacatgcacacgtatgtttattgaggcactattcacaagagcaaagtcttggaaccaacccaaatgtccatcaatgatagactggattaagaaaatgaggcacatgtacaccatggaatactatgcaagcataaaaaaggatgagttcatgtcctttgcagggacatggatgaagctggaaaccatcattctaagcaaactatcacaaggacagaaaaccaaacacctcatgttttcactcataggtgggagttgaacaatgagaacacatgaacccagggtggggaacatcatacactggggtctgtcagggggtggagggttgggggagggatagcattaggagaaatacctaatgtaaatgatgagttgacgggtgcagcaaaccaacatggcacacgtttacctatgtaacaaacctgcacattgtgcacatgtaccttagaacttaaagtataattaaaaaaataataataagccatgtccttttgcatcctaaagtgctcatcctcctatgtcccttatctcaacattaaatagaactgccaatggagccctgcagtgaagaactccaggggccaccattcatcttgcaataggcaaatgaggacaatttacatgaaatacaattttaaaagtgcctcccttgacttagacagcatgacaatctacctaattacctgagtcaaaacctcatgcgttatccttgatatctttccttcatatctaattgctgtcaactccagttcccgaatccctcacaaatccattctcctctcaatgtctaatgcaactcccctgatttagatgtcatcatcgtcctggttcttttaatttaaaatccaaacctcttcatactattttcagaatcttcagatactgttcccacttgccactctggcttccactctagctactttcccttaatcttctacaatccagtcatactgaaagtttctcagttgctctaagctttctcttacctttgtgattttagtcatgctttttcctcaactcaaatatttgtgtgtgtgtgtgtgtgtgtgtgtgtgtgtgtgtgtgtttcttctctttaccaagaagccttaacttgggcatccatagtattctaggcaactatttgagtataaccggtttacttacgaggtgatcccaggagaaatgttaggaaaatgagtgagatagaaggaaagggagacaatacagagtatattaatgagcatgttaccactatgggcaatggatactcgattctcctaggaacatttgggatataatacagaacacaccccagaataaccgcatacaagaagcaaggaagctgggctacccatcttctttcccctgttgtccttgattgacagcatttcctacagagtcagttattcagcccgatcattggacaggtttcacagctagagaaatccctcagtcagagtatggcagggctgaaagtgggacatcaacatatgctaagaacatatatgggaagccaaacctgatagctgaaaactcttttaatattcctcttctgggacccttttgaattattatgtcatttatcaagttttagtgggagaaattacaattaaacaacaaattgcaataaaccatatgtccagttcaacattgtttccctaaaacttggcccatagttggtactccctataccttttgactaaactctttttttttgttttacagtatattttacatttggtagcaataattacatccctttcaaagtttttccaggtgtttcagacttttattcactgctctctgcctcatttaggcagaaaaattggtatttggaaaagattttaaaggaaagtataagtcactgtttgagatatcaaatagtaattgttaaaatatggttttcttacatgaagtaccctgtgctcttaatcattaaccctctatcctgaaatactgtttcaaatactttctttgaatgttcacatttgagaaattccaaaagacaaacatttatcctataaaataaatgaaaatgtcatttataatatgttccaagtgcttggcacctatgctgattggatctaatcatattgtctgatgagatttcctctccagagataactaattggaatgacatagtgtaacagtgagctctgggtgaaataatcagacatttcgagctgaatgaatggcttttgtgtcagatgttgcagagctaaaacattatgtgttgcttcctgacttatgaaccccagagtttaattcttctctttttcttcacagattccattttttggcaagaaaagtcatcacttacttctgctgccccaaacgtttcattgttcctcattgcctcaaggaaaaagtcaatcatcgctatcctgaagagcactggtgccctagtttttgttgttgccatttctcatcttcaatattctgctggtgatatgtaaatagtatttgtcagggtccagtttattttagaatgccaatcgctgtacttggtatttcacataaaatattgtatttaaccctgagggcaagggagataattatttacgttgacaacagagttagattgaataaggtatggaaatcctgtagagatacacctatgatgtgattccaagtcgaactcaaatccagacgctttaccctttacgccctcctactcctccaagattcctctgaaggacaacttcatttcaggcattaacaaaaagcatctcactgtaatattgcagagtccctacaataagcattttacagatgagaaaactaaggcactacaacattaagaacttcgcataaagggacacagacactaagtggcggagtcctgattcaaaccatatgtatctgaattcacgttctattctttttccactctactatatagcctctttatctggaaaactacccccttcattcttccccagtcaaaactctacctattctccaagttacagctccaatacaacttctctgatcttcctctgcacttcaatagaacttaccacacttggctaatgagtattgccttgtactgtgatgacataaaataaaaataaaaatgtgatgctgggtgtagtggctcacacctgtaatcctagcactttgggaggccaaggcaggcggatgacctgagctcaggagcttgagaagcctgggcaacatggcaaaatcccatctctactaaaagtccaaaaaattagctgggtatggtggtgcacacctgtaatcacagatacttgggaggctgagtcacgagaattgcttgaacccaggaggtggaggttacagtgagctgagatcacaccaccacagcactctagcttgggcaacagagtgagactctgtctcaaaaaacaagtaaacaaacaaacaaacaaaagatatgaacaataaactattagagaatattgaatatttgtacatacactacctcatttgatcctaaaatttatccttattattccagttttacagaagggattgaaatgactttctcagaaattactcatgccgtctgctatgttgtcaagttttgacttgaacctgtctaaaaacatatatattttgctttggcaaaaatctagacttagataataaaatactaagcttaacttgaaatcttccaatggcaagcttcgatatatcaggctttaacatacattttcttgttgaatccttcatatagttgtaggaagtagttcatttgcttataacctcacagctttttctatactgttgttgattccttcaacaaaaatgtattaaatacctgttatatactcaatatggtaccaaaaagggtaaatctgctttagaatgttttaataatttcccatttttcttatgtttagaaccaaaatttctaatatgatgggttccttcctacctctccagcctaaacttatgcagcattagaaattgtcccaagcatcctagccacgatgaccttcttgcaattctcagaattattaaattctatattgcagatgtaggggaagaataacttcccatctgccctctgagggatcaataattaagtcgatgaaataaactgacaacaggcagagtaacatgagaaaaggtatacaaatttattatatgcaaggaaacatcacatgaaaaaaatcaaatactcaaaaacccagtgagatctagaagcttaggtgcaaatcttcctagcggagtgtgagggggagaagtaggcaacttagaacagagtaaattattttgtcaagatgaataggccctcagaaaaacacgtgaaagcctgtgacaaagtctgtctgggcatagtgtggacctctagcttcctctcctgtgatacaagctgatcttccctggttgatgagattcctgggaagagaatttacacagttgagttccttttgaaggacctatctttaggcagacagaagaagttcagagaaagcctcttcctgcatttaccattccccaagtatgcttagtttgaagtaatttgcataccaaaacaatatatcttgggtagcattcctgaactctttcatagcatacactccatagtgctttttaagtgctgggtgctattcataatagtttacaaatatttactattttaattataacaaccacctttagggtgggtaccattaaagccaatttatagaggaggaaactgtggcacagaaattaaatagtttgtataacgtcacacagcttaaatattatgcatcaagctctctggtcaagcatgccctgacctcctttgaacttgatctattccctgccagtaacatacctttttcttcagactgcagatgaagttactcttctctgaaaaggttcttccagtttattattttttttttgtacatactcatataattacatttgttttcacctttgcccgggaaatgtgcaattcgtggagggtatgtgttcacctccatatccctagcatggtatttgccacatagtaggcacccaactatgtgctgaattaataaatttggattgattaaataagtgtatcaggtaccacagtgcatactatcaggtataatccttgtcctccaggagctctaagcctaatgtcaaatacagacaagggaacacatgattataacctgacataatagctgtaatgattaaacacaagtgactgcagagcacagaggaaggcaattcattctgtctgatgatctgaaaggctttccagattctatgacatatagggaatgagcagaatttctaagggagaaaagagttggatggggtggtttcctgggtagaaggaaccccttgtaaggtacagacataaaagcagagggtgagatatgacatagagataaattgtttatgggtgaattggagatggcattgagagaagtggtgaagaatgaagcttattttgaagtttaaggtcagtattatgaaagatgacatagcctgtgctaagagttagaatctggttgtatagagagaaggaaacgataagtagtataataattttaaaagtattttcaatgtgctttagaaagatcaatcaaaccactaaatggacaattattcctctatctttgaatttggtttttgtagtattaatgcaaatttcaaagggtactccaaatagcccaatttaatatgagtcttaggacatcagggctaaagaagattgagaaatgattgaaatgtttcctggtatcacagtaatttgcaacaaatctctgtaatttgcattacgatacatgccaagctgcagtatgagacagccacaggtcatccccaagccctgagtatgctgtatctgttgcatttatatcttcatttcatgaagtctttcaaatgatatacctaagaccaattgaattcctaatcataagaattcctgtctttactgagttgatcacctcaatatgtttgtgaagtcagctttttttgttgttttcaataaaacaagattaggcacaaaccattttaaaaataatagaggatgcaaatagttcatggacaatgttaatgttcattaacaatagaatataaaccaaactaagtagatgttgtgcaacagtctccagctttgtcctactactggccaagacagctttaacatttccctcagcttgactaaatttaagtaagcttctttctgacttcagtccctgccctctctttgcttaaaacattaactttagaaacttgcgattgtaaattcctcctctgcccattagagatataaattttctacaacctagaaatatctttctcatcaaatcatcaagaaagagtgggctcctttctcccagtttctgagggaccgtaatagcctaatttagataagtgacaatcggctaacgcaaatagcctaatcattttaaccaacctcccccatcccaatgtcctcttgtagttttccgttagctcacgacagcatttaaatatcttcagcagaactgttcaatctctctcttctattgcaatggctatgatataaatactatgtctttaaaagtaatataacttagtttttccctacagttaattatcaacaaaatcacacatcagaaaagcttgctttaaaaacttgcaggtagatgcaacgtctaatactaaataatgaaaaaagcaagattcttaaaactctgcaacctacctgggtcagtcggtagcagcagcagcctttatacttattcattttcaaacatttgttgaatcccttactgtgtgttagtattgtttttaacatttgggatatatcagttaattaaacagataaagatccttgccctcaaggatcttacattttagaagagaagagcagacggaacagaaatgtgacataaaaataaattatagattatgttttacagtgaaaagttctatgaaagaaaaaggaaattaaagccaggttaagggatgttttaatgaattttacttggagtaaaataggaaagctttacaggatttttaatatggatgtgacatgattttacccaaagttttaaacaaaatagataattctggatgctgggtagaaaataagccataggtggaaaaggttaaaagtaggagatcagatgaaagttactgcagtttatccaggaaagactttagcacaaatgttaataataggtcaggcggtatgtagtaatatgttctagatatattaacaatcaagacaacaaagtttcctaaaagagaggatgtgagctgtgggagaaagggagaaagaataattaaaagctttttcgcttgaagcaagtaatatgcagttgctatcaattgagatggagagggttgcatttggaatagcatttgagaaaaagactaagagttaagtttgggacgtgcagatttttacgatttgaatgtatttcaagagtagctattgatttggaagttgaatatatgatcttggagttaggaagaactgggtaggagagataaatttgagagtcactgacatataaatgctattttaaaaccacgaggtaacaccaagggagtgagagaagaaaagatgaagaatgactgaggaatggtccttggtcattccaagtttcaggaatgaggaggaagaggggagaggaaagaggaaagttaggagaaacactaggaaagtgtgacaatctgcaagtcaaatgaagaaaatatatcaaaaaaggtacagtgagcctttggctcagatattgctgataggtgagtggaatgataattaataattgatcattggatttggcagtgcagagatcattgatggctgttaccacattcgtcttggtggagttggataaatacctggttggagtagatttaggagagaatgggaaaaaggatttaaaggtaagcagtattgcttaaagctgtcaaaagaagcaaataattggaataagtgtgctggcacttgaggaggcaagttaattttgttttgtttttataatatggtagaaaaagtgatatgcttgtatgttttggggaatggtccactaaagagtgaaaatttgaggaaatagaagagaagggaacattgttactgcaatgtcctggaggatgcaaaaagaaatagcatcaaatataaaaggagtgggcagttaactttacataggagcatgaatagttcatttatgtgaacaggcaggatgacagagtaggtggcaacagatgctggaaggtgggtagctgtgctgatgagagtctaaaaaagttctcttcagattaattcagcatttcagtgaagtaggaagcaaggtcttcagctaaaagtgaggtagagggtttgtggaagtataagcagagaggaagagctatgaattactgtctaagagatgggaaagggaagagattatcaccttcatgactaaccctcaataaaattttactgtactaaatgtcaagctgtcatatcttggttaacctctatagcagtagtgtgagataattactattattcccatttcacaggtgagaatactgagtctcagagaaaatagacaactgtcccaagttacatagttaaaaaacgatgacattaatattcaatttcaccctatatgacttcaaacatgatgcttttaattactttgcactgcttctacatgttcccttgggcatacaagtgtctcagaagaattaaaaaatatataaattatctctctttcttgcacatgatagaatatactcacatcacatttggttattaaagtcatttaatgaacatttcattctaaaaaaatatgctacagaaagaaatactgtaagttcaaacagaagtaactgacttcctaccattacctctcttgatatgtaaacccacattctaatattttaacattgcatatgttaagaggtggagaatattatagcattaatttcaaggatccatatattatacttccagcaatacaatctaaggttatatttgatgtttaacagctgattactataagcttttcttgcgtttaatagttgtattgattatggctatttccagcagcaagtaacagaaaaatccaaataaatgtggcaataaaaagaaagatttcacctccttatattatgagaaggctagaaatagatgcagctagctttgattcagcatctccaaaatattagctccatctctctaattctcttaactttttttccctcatgctcacaggattactgctgcaattccaggcattataaccattgagacataaacaaaaaggaagagagaaatggttgccaccatcaatagctgtcttattaattaagaaaacaaaagctttaccaagaacctccttcctcataaacatctattcacatttcatgaaccagaaatgggttgtgtatctactatagcagggagggtggctgacaaaacatggccaaggaaggattgggaatgggtgtcgagcttatcaaccagaatacctgcttcagcagtcattttaatattctagatatgaaatttttacatgatcttctgctgagccaaggcctcccatcttctctatatatagcttgatgatgaaatttaaattgtaaggctttgaattctttcattaaaaaaaaagtattggattctggccagaattctcatttaatgataagtttgagccttgattgatttttctcctatagtgagatcctttctatctttctattaatatcacatgcaaaaataataagtgcttttgtatgtctatcaacatcttaaaactctggtaggatcatagtcatgtgctagtaaaaaggaaactggaatagcagacaaggattgagtaaggaatattggagtacaatagtagcacagttgcagagaaatcaaaataaagaaaataatgtaatatatacaatgttatctctttttttattatttttcctccatctacttcaaattagattgaaaaaaaattacaaaaaaacacattcatacttcatatgaaaggtgaacataaatgtgttttcaccttttggtcgctatatagatgttgttctatgtgttaggactgtggtgcaaaaactaagatggtaataattgtaactataagctgaaacttttttttttttttttgagatgaaatctcactctttcccccaggctggggtgcagtggtgcgatctcagctcactacaacctcggcctccaaggttcaagcaattctcctgcctcagcctcccaagtagctgggattacaggcacctaccaccaggcctggctaatttttgtatttttagtagagatggggtttcaccatattggccaggctggtcttgaatttccgacctcaggtgatcagcctgcctcagactcccaaaatgcttggattacagacatgagccactgcgcccagccaagttgaaactttttaatgcttattttcaaccaggttcatagttctaagtgccttaaaaatattggccatgcgcaatggctcatgcctgtaatcctagcactttgggaggctgagtggggtggatcacttgaggtcaggatgtcaaggccagcctggccaacacggtgaaaccttgtctctacaaaaaatacaaaaattagccaggtggcatggtgcatgtctgtaatcccagctacttgggagactgaggcaggagaatcacttgaacctgagaggtggagattgagtgagctgagatcgcaccactgcactccagcctgggtgacagagcgtgactgtctcaaaaaaaaaaaaagtataaagtattaactaagaggtttcagacaagttggtcaactagacacagtcaggaaatgccactaccactgagagagactacattatccagtaaaccaccaaaactcaggcagatcttcaagagaaaatgctgagcggatggacagatgacactgaacctgaggctgaagagggaggaatctggggatcctgcacgtggtacctgaaatccgggtctagttcctggccaccagtggctcctgggtaagggttgaataagggaactgagggccagcttactctcaccatggacctctgggatcctagctataggggaccatgctcatggacctgtgagctggcaggggtatctccttggggagcaggaagagacaggccttcagccagcagagagcccaggagattttgtgtcctatgcagctccagcagagagctgccatccccaagtggcccctatgcccttctgggaggcacaggccacatctgacctagaagccaggagagagtcgggactgcatccccacaagactggggcatgtctgctctgcaggccatcctgccagctggcctctcctagggtctatgcttagcagtctgcaggagcaggtgcacagtgcagcccctgaagctcatcctgagggctgcatctgagtaccttatcagtgacccaggaacacattggattcttcagcataaccagaatcacaacaggagcctcaggatgtgtccatgccccaaggctggagtgtgcagctctggagtactgagatgagatccgtggctgacactgaagccagggaggagcctccatccccatagtactgagagaggcaagatgcatgagttactggcttggggtgggagctgggtgtacctccctccgtagggccaatttagagtgtggtattctttccaaccacagcttctgcccaagggagccccatggctgggaacacctaacaaaagaaacacaggtacagagccagcaattggagggatttaccctaaggcccagtagtgaacctggcaagtggaccatctctctgcctcaccaaccacagagcatacctgtgaacccaaggaagtgcaaaagagtaatgggctggatattaacctagttacaggccattattcttatgtaccatctactggatcacaaccctaactataacatcaaaactttgtcccgctaatgtatacacctgtgagataaagtgcaagatttcactgaaacataaagatcctgtacagagccctggtcctctgaaagcaatcggaaatgaagccaatggactatgctcaacttaaaccacagttaaaggaacaccaactatcccagatgagaaataatcagtgcaagtattctggcaatccaaaaagccagttgtcctcttacctccaaatgagtacattagctccccagcaatggttcttaaacagttggaaataattaaaataataggcatagaattcagaatctgggtggcaaaggaactcatcaagattcaggagaaagctgaaactcaatccaagaaatttagtaaaacagttcaagagctgaaaggcaaaatagccatcctaagaaagaaccaaactgaatttctagagctgaaaaactcactaaaagaattttatatacaatggaaagtattaacagcagaatagaccaagctgaggaaagaatctcagcactcaaagactggttctttgaatcaactcagtcagacaaaaattaaaagaaaaaaaagaattttaataaatgaaaaaaaattcaagaaatacaggactataaaaagagaggacatatacatcccattggtatccatgaaagagaaggagagagaataagcaacttgaaaaatgtttttgaggatactattcataaaaatttatctaatctcactaaagagcttgacatgcaaatccaagaaataaagaaaaccctcacttcatgctgtacaagatgaccatccccagggcacatagtcatcagattctccaaggtcagtgcaaaaggaaaaatcttacagttagctagacagaggggtcatgtgacatacagagggaacttcatcaggctagcaacagacctctcagcagaaacattacaagccagagagaccagggttccatttccaacatcctcaaataaaataaattccaaccaagaattcatattcctccaaactaagcttcataagtgagggagaaatgaggtctttctcagacaagcaaatgctgagggaatatatatcaattagaccagccttataggaagtccttggagaatgctaaagatgggatcaaaagaatgatatctgctatcacaaaaacatacttaagcccacagcccagaggcactataaagaaactacacagtcaagtctacataaaactagctaacaacacaatgacaggattaaaatcacacatattaatgctaacattgaatataaatgggctaaatgccctcacttaaaagacaaagagtggcagtctgtataaaaagacaaaattcaaccatcttttgtcttcaacacacccatctcacatgtaatgacacacatgggcccaaatttaaatgatgtagaaagatctaccgtacaaacagaaaacaaaaaagagcagtagccattattcttatatcagataaaatcgactttaaaccaataagaattaaggaagacaatgaaagatattacatattgataagggtacaatccaacaagaagccttaactatgctaaatatatatgcacccaacataggagcacccagatttacaaaacgagttcctcttggcccatgaaaagatttaggcaaccacacaataatagtgggagactttaacatcccattcacagctttagacaggtcatcaagacagaaaactgacaaagaaactctggactaagtccaacaattgacaagctggaactaatagacatctacagaacactccattcaacaaccatagaatatccattcttctaagtgcacatggaacatattctaagattgactacatgtacagttttaaagcaagcctcaataaattcaaaaaagttgaaatcataccaagcacactatcagactatggttgaataaaaagattaatgaaacccagagttgcttttctgaaaaaaataaaaataaacaagatttagaccactagccagcttaacaaagaaaaaaaagagaagatctaaataagcacaatcagaaatgacaaagatgacattacagttgatcccacagaaatgcaaaagatcttcagagaatactgtgaacaacgctgtgcacacatattagaaaatctagaagaaataaatcgctggaagcacacaatctcccaagattgaatcagaaaggattaaaaccttgaatagaccaatatcaagctctgaaattgaataagtaatagaaaacatgccaaccagaaaaagccctggaccaaatgaatccatagccaaattctaccagatgtacaaagaaccggtaccaattctacagaaactagttcaaaaaatcaaggaggagggactccttcctaaatcattccatgaagccagcatcagctagtaccaaaacctggcagatacacgacaaagaaagaaaacttcagatcaatatccctaatgaacatagacacagagtcctcaacaaaatactagcaaactgaatctagcagcacatcaaaaagttaattcgccataatcaagtaagccttattcctcggatgcaatgttggttcaacatatgcatatcaataagtgtgactcaccacataaacagaattaaaagcaaaaaccatatgatcatctcaatagacacagaaaaggcttttgaaaaaattccacatcccttcaggattaaaaccctcaatagactagctgtcaaaagaacatacctcaatataataagaccatctatgaccaacccacagcaaacatcatattgaacagggaaaagctggaaccattcccttggggaactagaacaaggcaaggacacccactctcaccactcttattcaacatagtactggtattcctagccagagcaatcaggcaagagaaagaaataacaggcatctaaatgggtaaggaagtcaaactatctctttactgactatataattttatacttaaaaaaccctaaagactccatcaaaatgctactggaactgataaacgattatagcaaggtttcagattacacatcaatgtacaaaaattagtagtatttttatacaccaataacatccagtctgagagtcaaataaagaacacagtctcatttacaacacccatacataaaaattaaatacctaggaatacatctaaccaaggagatgaaagatctgtacaaggagaactacaaaacactgctcaaaggaatcagagatgacacaaataaatttctttaaaaaaatcccatgcttatggattggaagactccacatcattaaaatggtcataatacgcaaagcaatttacaggttcatgccatttctatcaaaataccaatgtcattcttcacagaattagaaaatctatgctaaaatgtatattaaaccaaagaagagcccaaatagccaaagcaatccttaagcaaaaagaagaaagtcagaggcatcacattacctgacttcaaactatattatatggctaaagtaaccaaaacagcatggtactggtgcaaaaacagacacacagaccaatagaatgcagtagaaaatttagaaataaagccacacacctacgaccatcaagtcttcaacaaagctcacaaaaacaagctatgggggaagtcctctctatttaataaatggtgctgggataactggctagtcatatgtagaagaatgaaactggacccttttttgttatatacaaaaattaattcagggtggattaaagatttagatgcaaggcctcaaactataaaaatcctagaagaaaatttaggaaatatacttctcaacatcagacttagcagataaattttggctaagtccccaaaagcaattttaacaaaaacaaaaattgatagctatgacctaattaaactaaagaaagtattgtacaaaagaaaccatcaacagagtaaacagacctacaaaatgggaggaaatattcacaaactatgcatctgacaaaggtctaatatcgagaatccataaggaacttaaagaacaaataaccccattaaaaatggggagaggacataaacagacatttctcaaaagaagacatacaagtagccaaacaaacatttttaaaaaatgctcgtcatgactaatcatcagagaaatgcaagtcaaaactacagtgaggtagcacctcataccagtcagaatggctattattaaaaagccaaaaaacaacagatgctggcaagctgaagagaaaaaggaacactcatatactgttggtggaaatgtaaattagttcagccaccatggaaagcggtttgaagatttctcaaggaacttaaaacagagcaaccatttgacctagcaaccgccttgttgggtatatacccaaagtaatacagatcattatatcaaaaatacacatgcacttctatgtttatcaccatgctattcacaatagcaaagacatggaattaatctaggtgcccatcataggaggattggataaagaaaacatggtatacatccaccatggaatactatgcaaccataaaaaaaaatgaaatcatgtcacttgcagcaacatggatggagctggaggccataatcctaagtgaattaatgtggaaagagaaaatcaaatattgtgtgggaggtaaacattgagcacacatgggcataaatatgggaacaaaagatactatggtctactagaggggtgaaggaggaagggggaaatgggttgaaatactacctattggatactatgcttactacttgggtccaacacacctgtgtaacaaccctacacatgtacttggtatatctaaaataaaaactaaaaatttaaaaagtatattaactaactcgatcctcataataatccacaaaatggatgggtggctatcgctcacccatctcatttcacagatggggcacagaaatactgattaattttctgaaggtcacacaacccataagaggcaaaattataatttaaccccaggaagtctagcttgagtccatgtgctaacctctacactaaatgccaacacggaggtggtggttttgttattctgttttggattgctataatagaacaccacaaactgggtaatttatatttttaaaagaaatttatttcttacatttctggatgctggaaagtctgtgatcgaggagcccacattgggcaagggtcttcacgctgcatcatcccacagccaaatgcgtgagggcaaaagagtgagagagagcaagagagggtctaactcacttttataagaagcccactcttgcaataacttactccaccaataatgacactaatctattcataagggcaaacatgacctaatcactttttattaggccctacctcccaaaacactgttgcattagggatttcatttccaacccatgaattttggggtacacattaaaaccatggcagtggtttaagccaagcaccagataaccttcaaacaagtctcaacacattttggcaaaataatacaacaaatatcaatgaaaactttaactaaggagcaataacaaaagactacatggacattacaatttatgaaatgagacttaaagatgaatttaattttactaggcaagaatcgtttaaagatacagggacctaggaagaataaacctcatgatcaatggcataacattgagaacttcggaatgtcaggtaaaattcagcgtccaccttgttctgcatgttaagggaatagtaggagatacacctatcctggcaatcacacacacagcaatgactgtgggatcaaaaaatccaagtctcaatgctgctacttatgcaccagatgaactttgtcaaggtctttaatctctctgggtctcagatgggaatgaaaagtccacctaatattttatttgaaagattaagtgagagtgtaagtgttcaaattactattaactaaagctaggcctgagtgaaaaataggctaggacattattatggagagatgtgaatttcaggctgaggagatgccattgaagacctctgagaaggtaaataaaagagtagcatggttagaattgtctaaagttcaatccagtgctcagtatagaaggaggtataggatatacaggagtgtgatagggcagggatcaggagaagactgggaaatattaaaactggttgaaatatagtgaagacccatattctagttctggcatttggacctgaaataaagacagacatttcagaaacactacagaagcagataaaaataatttcacaattattttggatttaaaatggagggaaaaaaaaaccatcagtgattctgagacctcaagcctgagtgacttggagaataatcatgccaccatcaacaaaacaaaattttgaggaagaaaagccctttttggggaaaggataaattgtattatgattttgatctgtatatattgattttaaggaatcgataagacaccctggttgaattgtcctgcaatcagttagttatatgcattgggagcacaggaaagaggaagtggcaagatagagggtgtggtaaagagaataatgaacttttagtgatatcacatcctaatatcagaccaacaaatagattacagagcaaaacggaattaaagttggagatataattaaggtgaataatcagttgaccttaaaatagggatattatcctggataatctagctgggctcagtatcataaaaaaaattcttaataaaaaaggagaaagatgaagaggaatttgcagtgaagtgatgtgaaaaggatttaacaagcccattcaggctttgaggatgagaaaaggggtcaaaagacaaggaacgtggcttttctagaactcagaaatggtaaagaaagagattacttattagaccctctcagaaggaaatgcaaatgccaacagcttgatttttagcccagtgaaactcaggcagacctctaaactacaaaactttaagataataaatgtgtgttgtttaagcccctaaatctgtgctaatgtgttacagcagcaaacatgaactaatatatagtgatttttggaatattcaggatgaagataataatcaggaacattgtgattccaaacacttcctgaaagtggcctgtgaaacaaaactgcagctttttgagaaagcaggagttgtaagttgtaagtccttagaataagtgtagagatatcttgttcctgtaccaagttattcagaaccttgggagtataccaatcagttcatttgctgtgtagaatcttaatcttgcaaaaaggaagtcagcacgaattatctgaatttattccagggttcatttttatctccactatcatcatgcatgattcatttcagcactgcaagataaagaatttctggtcagggatattgactcatgcctgtaatcccagcactttgggagtccaaggtgggcagattgcttgtgtcgaaggatttaacaccagcctgggtaatatggtgaaactttgtctctacaaaaaatataaaaaattagctaggtgtggtggtgtgcacctgtagtcccagctattcagaaggctgaggtgaggggagacagtaagcagagatccagcctgggtgacagagcaagatcctgtctcaaaaaaagaagaagaagaaggagaaggggaagaggaaggggaagaagagagagggggaggtggagggggagggggattgttgttgttaaagtttcttgtcttgaggagaggaataaattgatcaaacttagacaacttaagccaccactgaaagaatggaaatagaaaatttagaaaatttcaagcttctcctttccagaaacttgcattctattttctggaaagatccagctaatatctcacagcattcaacatgggctgcataacttattttgtgtcctagagtgtcagtctttgttgcagaggagatgtggaattgtttgtgttgatttaaaaataaaaactatagccggccagtcacggtggctcacgtctataatcccagcactttggaaggccgaggcgggtggatcacaaggtcaggagatagagaccatcatggccaacaaggtgaaaccccgtctctactaaaaacacaaaaattagctgggtgtggtggtgcgcgcctgtaatcccagctactcaggaggctgaggcaggagaatcacttcaaccagggagttggaggttgtggtgagttgagattgcaccactgcactccagcctggcaacaaagcgagactctgtctcaaaaaaaaaaaaaaaaaaacactaaagccaaattaaaattaaattttaaatagtttaattgagcaaagaacaattgatgaatcattcctcttttttacagcccagatattttatttcctacagcaccagcacataaagctgtgtcaggatatcagatttctttaagaggtagtaagaaaaaatatatttcaaaatacttaactacacccttcccaaggttataagaaaaagcacaataccattaattaacttatgaaagtcactttattagcaaatcccagtttttagccttattttccttcattctagaaaaacagcacatttctccttttcaaaccaacacagaagaaatttctatcccaatttagttactctcccactcatgccatctccaatctccagctccactcgagagcatgggtggaaccaaatttagccaatacttatgccaggaaatgtggtaagagagagagggaaatccaaagcttcagcataatagtcaagagtagactttagcaaaccaagttctgccacctttgaagtgaagaatgaggattctttttgcttctacaatgggtaaatactggactaaacataaaacaaataaaaatagctttcacatgacaagtattaattcttggtgactatgcaaatagttccagaaaaaataatatttggcatatatgccattgatatacttactcttttccacagtaggaatcatagtttatttatattatgagagatcttcaaaagttaatggaaaatgtaattatgaaaaaaaccatgcatcgattttaagaattttgcaccaaaataaactcatactaacttgttgtgacatgtctgaatggggtctaatttgaggcactaaaaaggataagacattagtttgaaaagagcccttatcagagcaacatgaattttaccaaaattgaagcaaaaacaacaaatttatggtgaagcttgggtggaagaatgatgaagtcattgatgctttacaaaaagtttatggggacattgcccaaagaaatcagcagtttacaaatggataacttgttttttaaaggaacaagacaatgctgaaaataaaaccctcagtggcataccatctatatcaattttcaaggaaaaaattaatcttattcatgtcctaattgaaaaggaccaacagttaacagcagaaacattagccaacaccataaacatctcaactgattcagcttacacaattctgactgaaacatttgagcacactttctactcaatgggtgccaaaacccttgcacccagatcagctgtagataaaaacagagatttcaatggaaatttaaacaagtgggatcaagatcccaaagcatttctttgtagttgtaaaaggagatgaaacatggctttacaagtatgatcttgaagataaatcacaatcaaagcaatggctaccaagaggtggaagtggtaaaatcaaagcaaaagcagactcatcaagcgtaaaggtcatagcacagttttttggaatgctcaaagcattttcttcattgacatcctggagaataaaagaatcataacatctgcttattatgagagtgttttgagagagttagccaaaactttagcagaaaaacacctgggaaagcttcattagaaagtccttcccaccatgacaatgtttctgctcattctgcctgtcaaacaagggcaattttgcaagtgttttatggggcattattaggcatccacctatagtcctgatttggttcgttctgacttctttttgtttcctaatctcaaaaaaatttttaaaagacagacacttttcttcagttaataatgtaaaaaagactgtgttgacatggttaaattatcaggacccctagttctttatggatgaacaaaatggctggtattaccacttttaaaagtgtcttaaatttgatggagcttatattgagaaataaaaaataaaatttatatttattatttttattttttaattccattttccatgaacttttcttttttttcttttctttttttttttcctgaggctaagtttcactctctcacccaggctggagtacagtggcacgatctcagctcactgcaaccactgcctcctagattcaagcaattctcttgccttagcctcctgactagctgggattatagatgcctgccaccacacccggctaattttttgtatttttagtagagatggggtttcatcacattggccaggttggtctcgaactcctgacctcaactgatccacttgccttggcctcccaaagggctaggattataggcatgagccactgcacccagccttcatgaactttttgaagttaccttgtaatatttgaaaatcttccagggcccttccaatgccaaaaacacacacctttttcccctgaccctctgtcagtcttctgaatttaaagctgggctctgggacttaccagtgtgagaatgtatgtccactaatgtttagatagatattggacaaaaattttcaaatttacatttttcacttcttgggcgatgtaaattcattgtcaacaactgcattctcacctgactttagaagagggtatatctctcaaaccctgtgggtgaagtattcattcagatggaaacagtatgctgacaaacttctcctgatgagttgtttgtttattttctgaaatgatgacattaattggccaagaaggagagcacagtgtgcaggaaacacacagagggagttgaaaggctgcttccaactgctcactgtccttattggaaatcctcatgagcctcaatgaagggtatatctacttcagattgccccttttttctcctctttgggctatgtgatctatgattgcaattagcttggacatcaacattgtaaatatgtgacagctaatggttgcgtggtataaacacttataagatatgctaaaactgacagctttaatgtaatcaactccatgcagcagccaccttgtagggctgtagttttgagtatagaacatctggagttacactttaattggtggttgtaattgttgcacagctgtttgtaacagttctagctatgttaatcacgactgcaatgatgcttatcgggaagcagcactagagtccaattcatgagtatcaacagttgttgattcagaaagtcacattgtgtatttccttacttagcatcatataaaaagcacacagaaaagaataaatgaaataaaaagttccaattcatccatctgtaagtgtgtttgagttcagaaacattaacagattgtttcctgaaatgtacaaccaacccactcaaaatgagggcccatcattgtgttgccggagactctctgtagaaatatgggataaagtgttgttaaccttccattaaaaaaatagtatctaccagaatatccctgaagaactgaatgtgatatatgacacagaaaataagccacaagtttcatgaaaaagatgagaacctccatgctctaaactggaaagggagtatttgtttttttcttcacatgcataatggattatcagtgtgataaaagtgttcaaaaagttccacacctagcatcaagtcagaatttctactctgctgctacaaatgtggacatcttgagcaagtcattttgtgttcctaagtttcagttttctcatcagtagaatgaaagaataggattcgattgtttgtgaaatctcttccatctctcatatcttttgtacaaacttgactgttaattttaattttattttttttaccaggtcacccaagagctctgatctgactttttaaaagctacttactctcctgaagtttctagttaccaaatagaaagacacaaaattcagaaagctagggctcaacaataggagaataatgaagagaactttcaggataatggctgtaaaacaggtcccagaaaacacctagttcaggtgagagccagtaacaggagttcactaagaaggagtctcccagcaaactatcaacgaatgctttgaatagaaggaaattactgataggtactggataaagccattgaaacatctggatagaagaaatggtaattgatgccctcaaagaaagcaaatggggaaaaaaatagcatatgaaattttaaccaagaaaggaaatgggtttgtggcatgctttttagatcaacaatgaaagtaataagatggccactgatttttgatggaacaaaaaagctgaagggtaactgttttgaaaacagaggaaagagaaatttagtgtggaggtaggtaaaggagctgaatgtttatccactgtcttccaactagactgtaatttctggacaatgtcaaagtgataatgtctaaaatggataaatcaagacattaaagagcaagtacattatttagaagataatagcagaaaatacaagaagaaacaacaaaagtaaactaatgaaataaaaataaattggtttaggggagtacggttgtggggtggggtagataaatttttataattgatttgtcataattttttatctgttataagccttttaaaatgatgtgtctttttgacatatatatattattgacatgtatatttgacacatttatatggtttaccctgaaaagcaatatttagtctgaaagtaaataaaaacttcactcctgcttttagtgataaatacaagtcagaggcattaagagactgagcattagttatggaatttcacgtttctgggaacaaatatttggaaacctcagggtcctcagggctctcttattacaccttcccatgaacaagtcacattcctcaccatgattttgtatcccttctgttctcattgtcaaaaaaatctttcttcctctccttgtgtgcctactaaattctttttacatttaaaaaaacataaaaaatatttataaagctttttggatttaacctttcctatttagcacttttaataatgttgatgtggcaatttgaaatttgcaaaacccttttcacttcatttattcatttattacttcatttatttttcatttgggccatttatttgttagtgcaatacatttcctgagtttctactctgggtcaattacctagacaagaactggtgttaaaaggccaacaaaggagttttactggcctcatagcatttcacattttcaggaggaggcaatcaaacacagaaagtatgcagattaaggatatttgtgctgtttgtggttgtttctgtttgtttatttcagtcttatgattgagataaaaaatgtgatgcatggtttctggcttgtatattagaatctcactgtttctgtaatgaatatgtttcagctcaaaatatataatgagacaaaaattcatccataactttatgattgattaatctaatttccttaagaaaatgtagctcgatttaatcttcttcttttctcttctcgtcctccctccccctctcaagcaatacgccaactaaccaacaggctgccttgctgcctctgctctgacccgcagaaatggtccagggtaagttcaccataaattttcgtggcttgctcagagactggggcttctgtgatgaatttttcttccatccccgaggtgatggtgccctgttggtgggatgaactctaagcctgtgttttagttctattttcctggaaaggatgagatctttacaacaatgccatggttcagtgggaaatctgagtctcactttccctgtaatgcacttctaccccaaaagaaaatacgtctggatccttgagctgagactcagacccagatcttctcattccaaaacctgagctggatctagtctaccatgcatctcattttgccactcactcaacccttatggattgtcaatctttaagggcagtaaaagtatctccatttatctttgtatctccatggcaaacagctcagtgtcctgtacatatagacgttcaatgattatttttttaaatgaaatactcactacagccttttaatgacagtactatctctgcaattgaaactatttcttgctattccattgccacttaaatatatttcacatttttctcaaaaaccacttgtaccatttctaggcagactgaaacttttaaaagtcatactccctatgccagagccacaagggaaataagtcggaaagcaaggaaaataatttttaaaatttctttggttctccaagggttgcatgaggatgacacaaagtattcaggagaaacccaagtggatatttgattttctatagcagctgagacacaaacctgtatcagttacgcaagatcatccggaaacttgaaaccagtggaatagaactcttttcatgttaaacaaaagccatggagatgtgccagagactcaacaaataaggaaatatgttacagagtgaaaatccaaatttctgttgagtaaatactggggaaaaaaaggcaatttttattctaagaatttaaccagttggggaaaatagcagaccccctttaaaaaagccagtatatatgtaccagaaataaagatatataataaataattttttccacctagttaaatcattattcattttcattaattcattcaactaatatttatcaagtcctgctacagaaaatttggtaggtattgaatatttaaatacattgctaaatgtaagaatatgacctagaggaaaagttatatacagaaaccctggaatgaaaggatactccaagaaggacctaaagtaaaaataattgcctgaaactgagtataatctttaacatggtttttgaatatggtctttttatagctttattaaatgaaattataattggcatgcaaaaactgcacatatttaaaatgtataatgtaagaaatttgacatatgcctacttccctaaaaccaacaccacaatcaagataatgaacataaccatccccccaaaatttccttgcgtccttttattaggatggttacaaaagaaattatgatatttgccattggaagtaatggcaaaaaccgcaacaacttttgcaacaacttaatacactttcttcccactatgcctctcaggccttctcctcaggcaactattgatttgtattccgtcactctagattagtttgcattttaaatagttgtatataaatagaaacaaagtatatgcactacttctgtctgcagtttttcactcagtattattataaggttgttccgtatccttacatttatcaaaaaccactctattatattgctgagtaggactttatggtataggtgtatcacaattcatgtatccattgacctgttgacactcgtgttgttgacatcgaatgtcaacgtcgacgttgacattcgtgttgtttccaagtttaggatatttaaaatacagattctacaaatattcatgtatagcttttggtgtgaacatgggctttcatttcttttcattgttacctagagtagaatggctggatctgatggtcatgcatatttaatttgtaaagaaagttacaaagtgattctgaaagtgactgtaccattttctatcccaactatcagtgtatgagagtttcagctgctccatcctggctaacccttagtatgctcagtctataattttagccatcccagtgggtgtagtaatatctcattatggctttaaattacattttcctaatgattagtgatattgatcatctttattactattaacaatctgtatatataaatacccatgatgaggggtctgttcaaatattttgcacttatattgttagtctgcttattattaagttccaagtgttctttatatatttaacaacataaattatttttcagatacattttacaaatattttcttttagcctgtgtgttgcctttacaatttcttttttcttttttatgccctcactttaacttgagcctttacattttcttgacaatgtatttttaaattttttctgaagtctaacttaaggtcttttccttttacagttaaaatttaagaaatctttgacaaatccaagttttcttctatgttttctgatgtaagattagctcttgtgtttagatgaatgattatcttgcactacttactggatatggtgggaagtatatgccaaagctcactattttttacatattggacgttcagtggtttcaggactatttattgaaaatattatttattctcaatgaattgccttgctatctttgtcaaaaattagtttattatataggtgtttgtttatttctgtaatctctattttgttctgttttattaatcattttgtctttattggttccaataccaatactatctttgttattgtggctttataaaaaaaagtttttcaactttgttcttttaagttgattagctatgctagctccttggcatttccttataaattttgaaatcagcttatcaatttcttaaaaaaaaaccagttgcaattttgattggaattgtgttgaatatagagaccaatttcagagagaacaaaaacttaaaattattaagccttctgattcatgaaaataaattacattgttctattgtcaaatattaaaccaaccctgcattcctggaataaacaccacttgatcctaaaatattacccttttaatatattgttgaatttaatgttctaaaattgtatttaaaatttctggctggggcggtggctcatatctgtaatcccagcactttgggaggtcgaagtgggtggatcacctgaggtcaggagttcaagaccagcctggccaacatggtgaaactccatctctactaaaaatacaaaaaattagccaaggcatggtggtgggtgcctgtaatcccagctactcaggaggctgaggcaggagaatcacttgaacccaggagatggaggctgcagtgagctgagatcatggccttgcactccagcctgggcaacaagagcaaaaccctgtctcaaaaaaaaagaaaaaaaaaaagaaaagaaaaaaaagaaaattgcatattagtgttcattccgtttgtttgtctagtgttggtatcactgtaaatcttgcctcataaaatgagcaaaaaaatttacttttcttcaattttttggaagattttgtatggaattagtattatttcttaaatgcttggtagaattcttcagtgatgcctctgggtctggaattttcatgttgtgaatatttttaactacaaacttaatttcaaatatatataaatatacatatatatttcaagttatctatttctttttgattgagctttgagagtttacccttttcaagaaatttttttcatttcatttaagttctcaaacttattgacttaaaattgtaatattttcctagcagttttctaatatgtacagaatctatagtgatatcattcctcttacttttcatatttggtaacgtgtttatttttattttcccccatctatcttattaggggtttatacatttttactgaccttctgagagacatcctttttaaatttcattggtttttttctctattatttctctattattgactccatttatttcttcttaaattttctttctactgcttactttgagtctaatttgccatacagtttctgatttcttcagatggaagcttaggtcatttaagaacttcctgttttgttgttcttgttgttgtttctaatagagacatttggttctgtatactttgttctagatactgttttatcttcattctacacatttttgtatgctttgtttttatttttactgacttcaagatactctaaattctctttgatttagagaggggtcaattgtacgactcatttgtttcccctctctttgatttccttatgatttatgtggtcagagaacatgctttgtccaatttaaatcgtcttaaattgattgttacttatggcctatttaaaaatattgcttgttttggtaactgttccatgtgtacttgaaaataatacgtgttattctttttgggggcgcagtgctcatattgtggtctcttattctttttgtgtttcattttggacaatttctattgatttctgttcaaatttattaatctttcatctacaatattccatatattattaacctccagtgcatttttttctcttcaaccattatagttttcatttctaaaagtttgatttaggtatttttatatcttccatgcctctatttaataaattcaattttttaacgtttttgagtatatgagataaaataataataactattttaatatctattgattccatcatttgtcatttttgaatctgtttctaccaattggatttacaccttctgtgtcatattttcttgcttttttgcatgcctcggcatacgtgactagacgagaaacatcttgattttcaccttatcatggtgaatatttgtcctgggtcttttgtgtttctataaatatttttagttttgttctgggatatcgttaagttacatggaatcaatttgattatttcaaggcttgcttttaagctttcttaggttaaattagacattagagaagaaaacattagggctagttttgctccacaattgaggcaatgaccctcaaagtactctacctaatattcctggataaataagattctcagtctggctggtagaaatactggtactctgtgaactgaaaattggttccttttttcttatgtggatggttatttcccttgtcgtgggtagtttcatcacacatagcactgagcaactctaatgggacatattgtagttttctgaaactccctcttcaatgactatactgggactttgagctgccttggactctgcaaacttggtccaaactctatttcctcatctcaaggagaccccacatgctgcctgtgctgctaccggggtcaattatatgactcatttgtatcacctttgtcggtattactgtcctctggtgcccgatatctcatatcagaaatccactggttaatacttttgtccaatatttttattatttgaggtgggaggaaaaattgggtctccattactccatcttgtccagaaataataatgaagacacttgattattaatttgttcaacaactggacttttttggtctagtttgtaattcactttatcattctctaccccacatcttcaaagtaattttatttttcttttgcttttgaaaatgttctttatttttgtatcacaactgcaagcaaaaatttagtcttcagggaacaaaaaggtctgtggtatgttatatgaaatgtcatgtctgaatgagtttgttacaatgctttcaatgatattttcaaacagtctccatgagagatcatttcaatgaatatcaaactgtttttaatgattagagtagtagaaatagtatatacagagaaaatccacagaggtataaaagctggtgtccaatattatggtcactcaggttgtttcagttaggtctttgtgattaaaaagagaggcttctggccaggcacagtggctcacacctgtaatcccagcattttgggagtccaaggcaggtggatcgactgaggtcaggagttcgaggccagcatggccaacatggtgaaaccccatatatattaaaaatacaaaaattagctgggcctggtggtgggccctgttactccatttactcgggatgctgaggcaggtaaatcgcttgaacctgggagatggaggttgcagtgagccaagatcgtgccattgcactccagcctgggcaacaagagcaaaactctgtctcaataaatacataaataaataaataaaaataaaagcaaaacaaaaaaagagagcctttcataagtagatgaaaatagggatggtggttgttacaacaatcagtatggaatcacatggaaataatccaagaaaatatattaatataccattgagcatcattgaaattcaaactaaatccagaaagtgaaacatgatttcattgcacttcaatctatgctttagtactgctatgatccctattccctctgcttttttattgttgtttcctttagatgtcttgttgctgcctctttcaccatctaccagctttgctggcctctattctgtacatgtttctctaaattcaagttcctgactactcaggcagatctgttatgatatccaagccaagttccacccttgctgtagatattttcatgtttattcctattaccaattacttcagttactttataattcacaattcaagtatccaaaattgggaattccatctacccaattcatcttttgttacaagaccgcaccaaagttaacagttgagcttatgaatcgattgtctagtgatgaggtgtgcaaatatttaaagcttcaggatatggtcatatagataaccttagtaaatatataggtcagtgcaactttctttaaaagatgctgtaaactgagcaaacactgactttcacaagtctgatacttacatagatgagaaattagaggccagaatcagaaacaatggacagaatttacaaggagatagattttggaaaaaagcactgtttaatatgtttttaaaattcaaatatgttatagggtgagacctttctgtttaaccttgaaattttggtttttatgcatttcagattatatgagaatcatcctaaatagttgcagtattattcaacttttatacaagcaaaaatgctggtattgtagtatgaatgctaaaaataaaaaatgaaaataaaaaaaggacaaggaattccaataatatatcattcctttctttattatccatgttaatttttcagaatgatgagagggcaggatgaattaatgcttgatgttttgcaaaatgcaaaaattgtctcaggattgttctgaaatttaaatgtgaagaactaaatatgtttccccccgacagcttttcttgtaactggaaaactttccagaaatgcatctgataacaattgtctcctagatgtctcttattcacacttggttctttagaaggaatcatgctttcattaatgacattttcttttcacagttaattgtcagtcagtcaacgtctacctttgccaaatgtctgaaatagtagataagggaaaaaggtctcacaaaataggacagtatcttcctaaatgcataatattatctgtgagattagtcataaaacgaaatatttagactctggtctaaactagataaacagaagaaaattattagacatttatatcaaaatgtcctggttgatcatatcacatttggctcttttaaaatgtaaagctgatacttaaagagttgtgcaataggaagaagtgggaaaattgccacacacacacacaaagccattacagaataagaatttcaaagtagtctaatcaagtgcatcttcaggcaaatgtttgcaaaagtctttttataaagaatgaaccattaaaataaaaaaagagtctatatagatgtaccctacttctagaagaagaacaaatgtaatatctaagcattggcaggtcattacattaaaagcaattttgatagttaactatgcagaaacagaaatataaatctgaaacacagctgtaatcactctatggaaaaatctctgctattaaacacttggcaaagtggacagcctaacgatgtagtaaaatcctttgcactaaattcagtctgttacccctgatggagattaggcatcattagattttggtgcatgtttctgttatcttgcattaaagagagagctatgaatttatttcacagaattgatttcagtggttacaatattaactccggttgttgctttaaaaaattacctagtaatttaataactttccgttgagcaaagtaattgtaaagacttttgttttcatcatgaacttgttgacttaaagatagcattatctttttttttttaaacaggattttcctttgtgtggatgggagaatcctcctctatcaatgcattagtttgctcaccattcttcctacatttattaaaagatttttgagacaagctgcaccacaaacattttaagattaaatgtaaaataagatttgtaaaagttcagtaatagctatgaaatattgcaacgatgtatacgataaaaatatctttcttttcttcttcttctttttttttttttttttagacgatggagtctggctctgtcacccaggctggagtgcagtggtgcaagctcagctcactgcaagctccgcctcctgggttcatgccattctcctgcctcagcctccccagtagctggcactacaggcacctgcaaccatgccccactaattttctgaagttttagtagagatgggatttcaccatgttggcctggctagtctcgaactcctgacctcaggtgatccactctcctctgcctcccaaagtgctgggattacaggcatgagccactgcacccagccccatttaatttttttttttaattatactttaagttctagggtacaagtgcacaacatgcagttttgatacataggtatacatgtgccatgttggtttgctgcacccatcaactcatcatttacattagtatttctcctaatgctatccctcccccaggcccccaccccccgacaggccctggtgtgtgatgttccccgccctgtgtccaagtgatctcattgttcaattcccacctatgagtgagaacatgtggtgtttggttttttgtccttgtgatagttttctgagaatgatggtttccagcttcatccatgtccctgcaaaggacatgaactcatcctgtttttttttttttttttttttggcatagcattccatggtgtatatgtgccacattttcttaatccagtctatcattgatggacatttgggttggttccaagtctttactattgtaaatagtgctgcaaaaaacatacagatgcatgtgtctttatagtagcatgatttataatcctttgggtatatacccagtaatgggattgctaggtcaaatggtaattctagttctagattcttgaggaatcgccacactgtcttgcacaatggctgaactaatttacactcccaccaacagtgttaaagcattcctatttctccacatctgttgcaggaagtcagggaccccgaacggagggaccagctggagctgtggcagagaaacataaattgtgaagatttcatggacatttatcagttcccaaaattaatacttttatattttcttatgcctgtctttactgcaatctctgaacataaattgtgaagatttcattttaatatggacatttatcacttccctaataatactcttacaatttcttatgcctgtcttactttaatctcttaatcctgttatcttcctaaggtgaggatgtatgtcaccttcagaccactgttgtacaaattgattgtaaaacatgtgtgtttgaacaatatgaaatcagtgcaccttgaaaaagaacagaataacagtgattttagggaacaagggaagataaccataaggtctgactgcctgtggggtcaggcaaaaaggtccatatttttcttcttgcagagagcctataaagggacatacaagtaggagagatatcactaaattcttctcctaccaaggaatattaaatattaagaccctaggaaaagaagtgcattcctggggggaggtctataaatggccactctgggagtgtctgtcttatgcagttgagataaggactgaaatactccctgttctcctgcagtaccctcagacttactcggattgggaaattccagccaggtaaattttggtcacactggttctctgctcttgaaccctgttttctgttgtttaagatgtttatcaagacaatacatgcacagccaaacatagaccctcatcagtaattctaattttgtaatttgccttgtgatctttgctttgagctttgccttgtgatctttattgccttttaaaacatgtgatctttgggacctactccctgttcatacaccccctcaccttttaaagtccttaataaaaacctgctggttttgcggctcagggcatcatggtcctaccgatatgtgatgtcacccccggaggcccagctgtaaaattcctctctttgtactctttctctttatttctcagactggccatcacttagggaaaataggaagaacctatgttgaaatattggcggatggttcccccaatacacaccctctccagcatctgttgtttactgactttttaatgattaccattctaactggtgtgagaaggtatctcattgtggttttgatttgcatttctctgatgaccagtgatgatgaacattttttcatgtgtctgttggctgcataaatgtcttcttttgagaactgtctgtttatatactttgcccactttttgttggggtcatttgtttttttcttgtaaatttgtttaagttctttgtagattctgcatattagccctttgtcagatgagtagattgcaaaaattttctcccattctgtaggttgcctgttcactctgatggtagtttcttttgctgtgcagaagcactttcatttaattagatcccatttgtctattctggcttttgttgccattgcttttggtgttttagtcatgaagtctttgcccacgcctgtgtcctgaatggtattgcctaggttttcttctagggtttttaatggcgttaggtcttacatttgtctttaatccatcttgagttaatttttgtatacagtgtaaggaagggatccagtttcagctttctacctatggctagccagttttcccaacaccattaattaaatagagaatcctttcctaattgcttgtttttatcaggtttgtcaaagatcagatggttgtagatgtgtggtgttatttctgaggcctctgttctgttccattggtctatatatctgttttggtaccagtaccatactgttttggttactgtagccttgtagtatagtttgaagtcaggtagagtgatgcctccagctttcttctttttgcttaggattgtcttggctacacaggctcttttatggttccatatgaattttagttttttgcaattatgtgaagaaagtcaatcgtagcttgatagggatagcattgaatctataaattactttgggcagtatggccattttcatgatattgattcttcctatccatgagcatggaatattctttcatttgtttgtgtcctcttttatttccttgtcagtggtttgtagttctccttgaagacatccttcacatcccttgtaagttggattcctaggtattttattctctttgtagcaattgtgaatggaagttcactcatgatttggctctttgtttgtctattattggtgtacaggaatgattgtgatttttgcacattgattttgtatcctgagactttgctgaagttgcttatcagcttaaggagattttgggctgagacaatggggttttctaaatatataatcatgtcatctgcaaacagcgacaatttgacttcctcttttcctaattgaataccctttatttctttctcttgcctgattgcctgggccagaacttccaacactatggtgagagagggcatccctgtcttgtgccagttttcaaggggaatgcttccactttttgaccattcagtatgatattggctgtgggtttttcataaatagctcttattattttgagatacgttccatcaatacctagtttattgagagtttttagcatgaaaggctgttgaattttgtcaaaggccttttctgcatctattgagataatcatgtggtttttgtctttggttctgtttatgtgatggattacgtttattgacttgcatatgttgaaccagccttgcatcctagggatgaagcagacttgatcatggtggataagctttttgatgtgctgctagattcaatttgccagtgttttactgaggattttcacatcgatgttcatcagggatattggcctaaaattctctttttttgttgtatctctgccaggctttggtatcaggatgatgttggcctcataaaatgagttagggagaattccttttctatttattggaatagtatcagagggaatggtaccagctcctctttgtacctctggtagaatttagttgtgaatctgtctggtcctggacttttttagttgttgcctattcagagtctgttactggtctattcagagattcaacttcttcatgggttagtcttgggagggtatatgtgtccaggaatttatccatttcttctagattttctggtttatttgcatagaggtgtttatagtattttctgatggtacttcatatttctgttggatcagtggtgatatcccctgtatcattttttattgcatctattcttctctcttttcttctttattagtcttgctagtggtctatcaattttgttgatcttttaaaaaaagccagctcatagattcattgattttttgaagggttttttgtgtgtctaactctttcagttctgctctgatcttagttatttcttgccttctgctagcttttgaatttgtttgctcttgcttctctagttcttttaattgtgatgttagggtgttgattttaggtcttccttgctttctcttgtgggcatttagtgctataaatttccctctacacactgcattaaatgtgtcccagagattctggtatgtcgtgtttttgttctcatttgtttcaaagaatatctttatttgtactttcattttgttatgtacccagtagtcattcaggagcaagttgttcagtttccatgtagttgtgtgtttttgagtgagtttcttaatcctgagttctactttgattgcactgtggtctgagtgcaacagagttgttgtgatttctgttcttttacatttgctgaggagtgctttacttccaattatgcgtcctttttagaacaagtgtgatgtgatgctgagaataatgtatattctgttgatttggggtggagagttctgtagatgtctgttaggtctgctttttgcagagctgagttcgggtcctggatatccttgttaaccttctgtttcattaatctgtctaatattgacagtggggtgttaaaatctcctattattattgtgtggtagtctaagtctctttgtaggtctctaaggacttgctttatgaatctgggtgctcctgtattgggtgcatgtatatttaggatagttagctcttcttgttgaattgatccctttacgattatgtaatggccttctttgtctcttttaatctttgttggtttaaagtctgttttatcagaaactagaattgcaacccctgctttttttgctttccatttgcttggtagatattcctccatccctttattttgagcctatgtgcgtctttgaatgtgagattggcctcctgaatacagcacactgacgggtcttgaccttttatccaatttgccagtctgtgttttttaattgaggcatttagcccatttacatttaaggttaatattgttatgtgtgaatttgatcctgtcattatgatgttagctggttattttgcccattaattgatgcagtttcttcatagcatcgatggtccttacaatttggcctgtttttgcagggactggtaccgcttgttccttttcatgtttagtgcttccttcaggagctcttgtaagggaggtctggtggtgacaaaatctctcagcatttgcttgtttgtaaaggattttatttctccttcactcatgaagcttagtttggctggatgtgaaattctgggttaaaaattcttttctttaagaatgttgaatattggcccccactctcttctggcttgtagggtttctactgagagatccactgctagtctgatgtgcttccctctgtgggtaactcgacctttctctctggcttccctttacactttttccttcatttcaaccttggtgaatctgacaattatatgtcttgggtttgctcttctcggggagtatctttgtggtgttctctgtatttcctgaatttggatgttggcctgccttgctatattggggaagttctcctggataatatcctgaagagtgttttccaacttggttccattctccccatcactttcaggtgcaccaatcaaacgtagatttggtcttttcacatagtcccatatttcttttttttttttttttgagatggagtctcgctctttcacccaggctggagtgcagtgacgctatctcggctcactgcaagctccacttcctgggttcatgccattctcctgcctccgcctcttgagtagctgagactacaggcacctgccactgcgcccagctaattttttatatttttagtagagacggggtttcaccgtgttagccaggatggtctcgatctcctgaccttgtgatccaccaatcttggcctcccaaagtgctgggattacaggcgtgagccactgtgcccggccatagtcccatatttcttggaggtttgttcatttttttttcactcttttttctctgtccttggtttcttgctttatttcattaatttgatcttcaatcacagataccctttcttccacttgatcgaattggctattgaagcttgtgcatgtgtcattaagttcttgtgtgagggttttcagctctatcaggtcatttaaagtcttctccacactgtttattctagttagccctttgtctaatcttttttcaaggtttctagcttccttgtgatgggttcgaacatcctcctttagttcagagaagtttgttattaccgaccttctgatgcctacttctgtcaacttgtcaaagtcattctccatccagctttgttccattgctggtcaggatctgcgatcctttggaagagaagaggtgttctgatttttagaattttcagattttctgttctggtttcttcccatctttgtggttttatctacctttggtctttgatattggtgacctacagatggggttttggtgtagatgacctttttgttgatgttgatgctattcttttctgtttgttagtttttccttttaacaggtccctcagcttcagatctgttggagtttgccggagttccactccagatcctcattgcctggctatcaccagcggaggctgcagaacagcaaatattgctgcctgatccttcctctggaagctttgccccagagggtcagtcgcctatatgaggtatcagtcagcacctactgggaggtgtctcacagttaggctgcatggggatcaggggcccacttgaggaggcagtctctccgttctgagagttcagacgccatgctgggagaaccactgctctcttcagagctgtcagacagggatgtctacatcccttcagactacaaaagttgtctgctgccttttgttcagctatgccctgcccacagaggtggaatctaaaggcagtaggccttgttgtgctgtggtgggctctgccccgttcaagcttctcagaggctttgtttaccaactcaagcctcagcaatggtgaaggccctcccccagccagcctgctgtctcacagatcgatctcagactgctgtgcaggtggtgagcaaggctctgtggacatgggagccactgagctaggcacgggagagaatcaccttgtctgccagttgctaagactttgggaaaagcactgtatttgggtgggagtgtcccatttttccaggtagtctgtcatggcttcccttggctaggaaagggaaatcccttgaccgcttgtgcttcccagttgaggtgacaccccgccctgctttggcttgccctccgtgggctgcacccactgtctgaccagtcctaatgaggtgaaccaggtaccttagttggaaaggcagaaatcaccagtcttctgtgttgatcacgctgggagctgcagactggagctgtttctattcagccaccttggaatgcaccccctaaattttttagtgagagacatacactactttttttcccaacctggaacatttgctttaaatctataacaattaccatttcagtttatctctttcttccccttaggtggaaacacagaagtggaatctagaggcagtaggccttggtgagcacttctatcatcatcttaagcataatgatggttgctcttcattttcactcacaccctctaacttgttctcattttatgtgtggcacctaagagagtgctcctaatatataattttctaaaatgtaataacatacttctcataaaaatatcaaatgaacatatgttagtgatattatttaacttgtgaattaatgaagcaatgttaaaactggctcacatgagaatttaaggtggttagctatttacagaaaatttaataaagcaatgctagaataagatttctgaatgagatacaacactagttaacatccaataggttaataaaacataacctttgtggttatctattcttctggaaagaagtgatttgcatctctatcagaagtaaatctacaagtgaatttctgccccttccaagctgttaaagaacccagtcaataaaaagtcaatcaagagggcaaacacagaactgctttgagagaacacccaataatctcttttgtcatttccatgttttcataatattttgacagtgccttgaaaataacggacatttatgaaatatatgtggaattggagaagtagagactgagtggatctgaagtcctttataccgtggttttgggatatcactagttaaaaacttctgattaaaggccatatgaagctgggtgtggtggcacatacctcaggaagctgaggtgggagaatcacttgagctcaggagaacgaggctggagtgagctataactgtgccactgcactccagcctgtgcaagagtgaggccccatctctaaaaacattaaaaaaaaaaactagataaataaaggccatatgattattctcaagcaggctccactagacaaacaacaagaccaagaaggtcagggcactcagaagagatgtgtaactgctttctgagcaaagctggataaatggtactgggaaaatataaatattattgatccatgatatcttaaaagtttgaaagagataaaggcattttgcacatttctgcaattagaatgtacttttggcacatatcttgatgagtatactgctatatatgaagcctcctacagatgggggcttctttttaagttgcatgttgtgagagataattgattaaaaattcaaatttgagcatggatggcctcaaaaatcgtgtttctatgtatttatttttattatttattcatctatttatttatttttgagacagactgtcactctgtcacccaggctggagtgtagtggcatgatcttggctcactgcaacctccgcctccaaggttcaagcaattctcctgcctcagcctccgaagtagctggactacagatgtgcaccaccatgcctggctaatttttgtattttctgatattattaatagtagagatggagtttcaccattttgcccaggctggtctcaaacccctgagctcaagtgatcagccaacttcagcctcccaaagtgctaggattaaaggtgtgagcccatcatgcccagccctcaatttattttatgttggtgtcatttatcttttattttctaaaatctgaattttgaagtttagactctgaaacccaatttatcttcctcatttgtaaaggtaagctaaatattagctttttaagaaaataattattcaaaaattaataaaattctacaattccttgaagactgtttgaaaccttctttgttcccttaaacatacactgtgaattattttcctattataaataataataatatgataatccctcttaaagttcaatctttgtcaacatttatgatatttttcttaggttaaatttctacaaatatttttaaaattctgtaatattttcataggctaaatttctgctataatttctgagttaatctgtttatgcaatttttaaccattttgaatgtattgtcctattttcttccagaaaaaagaaatctttttaatttactgtcccaataacaatacataggaaggcttaattctccttttgctaatactgttggcaatttgaaggctgaaaagtggtacttagattttggagggttttttttaacgtatttgattccaaagataaaacatatatccaaaggattattggttgcaatgttattttggataatagatgtttttcatttacccatctagaatcgttcttcatcacctttacctgtctgctctgttgccctgtgatgctgacgtctatggaatgcatcaatatgatccctcttcatctgtgtgcagctttgcagctgtaattagctaatgagagcctcctgctgaagatggggtggtgggagtactattaagccaatttttccccaatccgctttctcttgcttatcatgtgttggatgtatttctctaagtagtggtgctcatagatgtagctcctagatccctttactgaaatagtgcatttgtctccaagttgctttaattactggttgctaacagttgccccttatctacagaattgtcctcggccaaatgggaattaccttgccaggtaagttatgccgatgttcacaggggtaagacaattactggcttacactgggatacacaactcccctacccttcttcctcaaagtggaatcaactctgtggggcaattaatactgcagagctccccaagggatcagactaaagattcggtacagttggagtcacacagttgcttacctttttcctcctttgttctatcctgcttttctcactcaccttctcctaatagcactttctcaataaatcaactgcaaataattcctgtttcaggctctgcttctaagaatttgacctagtacagtggataccaggactgattttagggagcaggctcaaaagatgagttgaatctcttgtaatgagaactccatcactggttgtacgtaaagtatcgatgggccattgcatgttatagcagtgtgatttttaagacttctctattgaaaaggaactggataaaagtggaagggaatttactatctggagagtgtctcttacatttaagaggaataaagaaaagagtatagaaactatggcactgtgtgtctattactaagtactattgattcatgtaaagtgcagatgacaagctcagatttagtaatcagccatgtaaaacagtgtgaggggaaaggcatctgtgacttccttatacagacaccccgtcttctgcagttggaggacagacagaactgaagactgaaggcacagtgaaggtacaagagatcatttaagagtggcagaaccttagagaaggctgacttctcagcctaggtaagtctcctacgccaaagttagggccatgataaggaagggatgggacgttgatgtttgaatggagatgtatgcgtagatgcacttaaacctgaatccgctgattaccctaatatttctgtgtttgcagaagtggcctactcccttggagtataaagccccattcttgctaaaagactgtgcagaagcctcaaatgagacaggtgccttataccataatgctttccctcctcagggtaccccgagctcccctcctggctgccacaatcataactagggtcaaatctcagcattactgtcatctgctaaggaataacaatgaatgtaaccatacaaacttcagagcctggctaatacactgtgaggaactaagaaattatattgaatagtagatactaacaatgttggatcaaaacagtctatatatgtatatatattatatatataattatatatatcgaattatatatataatatatattattccattttatgtatatataaaaatatataactgaataaagagtttgttaatatggaagcactattgtgattcaggatttaacacccagatgaagattctcatatgcttccggaatggctcttgggagcctggataaaaaatagaagcacaggtgccataattgccatagtaaatcatgaaggtaaagatcaaaggcccagaaaatggacctattgaaataaatctacttatatggtagaccaaaaataaataaataaataacccaaagcaaaaccacaaaacatcatctagtgatatttctcaagagggtccagagtacattttatacgatttacaaaagtgataaagaatgtatcaaggaaaaggaagccagcatcacagtgtcattaagagacccagagaagctggtccttgtgtgcaatgctatctgaaagagatgctgttacaaactggactctctaataacaatgggtatgacaggaactgagaaaaaaaggccaggtggcagcacttaaccaacaaaagcaaggtgggctatttcaatgggtaggggtaggcacaactacaattggcaagataagaatagcagctgtaaggcctaatccatagctatctatggagatgattaatagaatatgtcattttaggagcaggatagataaacaacaaaaaagcacattgtttattagaatcaaaggaaatcaagaatagttgggcagaaagctgaggtcagctgcccactacaaagtcacaagcccctcatatttcctagatatgattagtcctcatacccagacccaaacagctgatgaaagggctgcatcttaattaagaaagactctacaaaaccagggcaagagtttataggaatgacttccccacagacaacctatgaccttttactcaacttaccatacactgaagaaaggggaataccagatctcttgagcgttgttgaatacgaggttcatgctgatgctattacagttacagtaagaatcccggagtaccaggtcagataataaagtcctggcctatgactcattggcagaatcttcacatttgtttcttaacttgtaggtttttgtgtagttctggacttgtgcatagttttaaaaagtgtgtgtgtctgtgtgtgtgtgtgtgtgtgtgtgtaattttttttcagagataggctgctgctctgttgctctggcaggagtgcagtgatgcagtcatagctcactgaagcagtgaagttctgggatcaagtgatcctctgcctcagcctctcaaatacctgggattatgggcacatgccaccatgcctggctaatttttttttaatcttaatttttttgtggagacaggttcttgctatgttgcccaggctgatctcagactcctgctctcaaacaatcctctcgcctcagcctcctaaagtgctgggattataggcataagccatgatacccagccacttttctaatacatatatatataatatacatagtatatattatatatataatatacatagtatatattatatatataatatacatagtatatattatatatataatatacatagtatatattatatatataatatacatagtatatattatatatataatatacatagtatatattatatataatatacatagtatatattatatatataatatacatagtatatattatatataatatacatagtatatattatatatataatatacatagtatatattatatatataatatacatagtatatattatatatataatatacatagtatataatatatataatatacatagtacatatttatatataatatacatagtacatattatatatataatatacatagtacatattatatataatatatatagtatatattatatatagtatatatagtatatattatatataatatatatagtatatattatataatattatatatagtatatatttatatatatattatatatatatatgagaaaaaatatacaacctttgcctcctgggctgggattacaggcacccaccaccatgcccagctaactttttttttttgtatttttagtagagatggggtttcactatcttgaccaggctggtctcgaacatctgacctcaagtgatctgtccaccttggactaccaaagtgctgggattacaggcatgagccacagcgcctggcctctaatacattatatactggaaacaagaggaagaagtggggaggcacccataacagaatacaaacagaaaaaaatgaccctgtatttaaaagaataactacactgaagaaagcaaggtagaggaccaaccccgtcattttgcattttgtaatggacagggggattcttgtctctcctgatatgatgcaacaggaaggatacaacatttcttctatggtgttcctgtcaaaaaaattattacccacatctaatcattaggaaaagtttgacaacccaattgagggacattctaccaaataacgacttcatacatttaaaaatgtcaagtttataaaaatgttgaactattctgttaaaggtgactacagacacatgacaactaaatactgaatgtgatctggatttgattctgcacaacaaaaaataaaagaaatttttatttaggacactcgtgggacaattggtaaagtctaaaggaaatctgtgataatagcattctgtcattgttaattcttgaatttgagaatcatactgtatttggaataaacatattagaacactttgaagtgaaggataaagaaattaccataaaatatttgcataatctagatgaaacatatatgggagttatttgtatcaattttccaacttttctataagcctgaaatcattttatttcaggctttaaatatacatgcaaattactttaaaaatacacgcaaaagttgtaatcctttaaaggagtatatttttaaattcatagcagtacctgaactccaaagaggtttattttttacttttcagtgctgaactacttagaggatggatatatccggtaatgtcataattatatcacgtctctcaaaatctctttcaaatgtgtattttcaaatcgctctgtatcaaaatgacttaatatcccaaaagggtagaaaaagcaaagcatagtaaacaggtagtataatttaattacctttgctttctctctttaagcatgtctgacacagtacatacaggtcaatgaaataaatcattgatattcccatggttttcatggcagtctctaatatcctttctgatttgattgtatgactagcttacaacctcagcttccactgtggcttcatttactattccttggattcaatgttattgtatttacttattaatttacttattcaccagcaaatgttaaccacaaagtaggtgccaaacactagaatattgttttaatactgtgtatttgaccttaattttcttctaaaaacattggctttgtagttccctctcctgacttgttgcagtttgaactatctttagaaggatgctctatcttaattaactctgcagaccccaactccatcccatttacctacatccaatggaatcagtccagtaatctgcaaagagtagatttggataaaataagattacacgcatattttaagtgaaatttccatcttcccaccaatgtgtttgacatgctattctaataagtttcaataatcagagaaagcatgtatgtatatataagtcaaactacgttagtaggaaacaatttcatgctaaagttcacacagatagtatatttgaaaatgtagaatcaaatagatatatacactaaggaaatatataaaagtaaaaaattattttcagtttcataatattgtaaactaatattggtaatgtccctgggtttcctttgggcaattaggggaaaatttaagcaatttaaggttcaggtgtgtggtgaacaaaaagcaatgatttgatctgtctttttgattcagttatgatctccccaggatagtttaacttatccctttgcctaaaagtgaaatattgatccccaaacactaaaggtgttttttatactgtatatttagtacagaaacttgacttatcccaaaatattttattccatatacttccttaaactgaagtacaacaaggtcttgtagataaattaaaacaataaaacaaaatttagtttaaaaggaagtaattgccagctttgaataatagtttgattattgattaactcacccaagttaaatgaatcacagttattccttttcctcctaagaatcataaattgaaagcctttgaattaatgctgaaataatgacagcaaattttactataatgaacagcacctcatcatttctgaagcatttgagacctagcaaagctcttatattatatgaaataacatgcctcgatcttctctccctgctatttaaatctgagaatttaaaataatgtcaaatcaatgagaactacctattctcaccccagatcaacagcaagttattttccctgtttcttgagtaaactacttctttggctcttctgatgaaaaagaaaatatgatctaaatcctaggaaattggcatttttctggtgtttggggagttgactactgctgactttgacacattcatataacccttcctttcaggcaggatttactaacataaacaatttgtattcatcccactgatgttgaattgaaatggttgagttggaaagaaactctagcaatgaattcacatattattctcatagggccaagcaattaaataaggtcctcaggtcagacttggctcaaagcttccatgctctttttcttgaattccaatgctcttgtgaagctttcttttcctagggtcttaaattcttgtgaacatttcttattctgactttccgattttgcaaaatttttgatcccttaacctcagagttacttcagggctcagtctttagatttcttctttctctatatacactcccttgggatcttatacaatcccaatgccttatatacaatcctgttgttttaaatgctcccaaatttatacctctatctcattactcttcttgaactccgggctcatttatttaatgtctagttgatatatctacttacatacctaagaattatctcaaagtgaagcatacccaagattctattcataaactgctccctcaaatctgctatagcctaattttttcatatcacacagtgataattcaagccttctactttttcagaacatacattttggataattttcagtcctcaattactcacactttcattcaatttagcagaaacacattcatgacatcacttcaacgtacagtatatctaagacaaacaatgcagtcaaaattgtagccaagaatcacaaatgatgctaaaattaatgggaaacatacgatgtaaaactggatatctgtgtaacctcaaattctttccccccaaaatacttattaattgcaaatggaaaaatagttaccttacagaagagaaatcccatagacatcaccttaaccaagtaaagaaatttaacagcactaaaaatactgtcatcatgtacctcctgataggacgcactgaggatataatatcactgctctttcattcttgccaaaaacacacaactgaaatttaacctgaagaacaactgaacaaactgaagttgaaagacatttataaacaggtaattcttcaaatgtattaaggtcatgaaagacgggggaagactcagaaactttccagactgaggaagatgaagacgtgacaactgagtgcagtgtaaaattctgttagcttcttaggcagagaactttatcccttttagtgctatcttcgttcagattacggtttcagtgctattgtttccacaactgcaaaggctgatcaatgtacgtccttaatcaaagatagttctctccctaaaaggaattctggtgcaagctctttaaaataagagacatgctttgctacacaagtaaaaaattgtagtacaaggaattctgggaatgcttttgataccatatttcttgggagcaccaacagggcatgtataggtacctatgtctaacttcatcttccaagtgagtcaagctgcccaaattactgtaaacgcctccttagaagattgtgtccctcaaatgtagcccttatcgcacggaccttgataattaattatggtactcatctttgtgaagaaagatacctgcttttaaaaaaagatatcaacgtatatagaaaatcacatttttaaattgatgtcacacaaatctgtgctgtaaagtagttaaccccttttacacgaaaaagtaattaactgttaatcaaaattaagtaagcaaacatcaggactggcttgttttgctccagttctaagagattgtttcctttgacaacctgtaatggtattttttacaattctacctgagccacaggtcaatctgaggattgagatatagaagattttctgaagacataatagacacttgaaattacaaattattcattatgagactcttcacagcatgcattatctcatttgaaccatggtgggattgttctattcaggaagatcaaatatttggattataccaaagaaagcaatgcttaaaataaaaataatttaaaaccatggcttttaaagctgtattcagagctgataacaagagcacacagccccagagaccccaaattcaaattaagaatattacttttattgcactatgaactatattttcttgctcaagctgagacattcagcagctaacaatattactgttaagcatatattaaacaaaaaactagggtatggtatttccttgtgcagacaccaaaatggagactacaatgtaatcacattgcatttcctagtggtatcacagagaaatggacaaagagcaaaaataagtgtagctaaaacctgtagataaaccatagagctatctctagcataaacagaacttaatataacacatctctgcaacaatcagcattgccttaggaggataacaccacaagctgttttatctgccataaagagagtactgcggaagttaataaatgcaatacagaattatttgcaagcaagaaaaagtagaagttagttaaatgaacaagtgattatatagttagagaattgggttcaagaaataatactgactacacagtgaataggtggtcagatttgttagaaaacataagcttttaaatacaagccccttgaagatgacctgagcccaggatgtcgaggctgcagtgagcaatgattgtgtcaatttactccagcctggctgacacagtaagatcctgtctcaaaaaactatagatatagtctctctaagataatatttccaactcattcattcatgacaccattgaccttatgtcgaatttctcatattcgtgaagagcattatgtatattttctgtttgcatttgtaatttttaaaaatacttcagaatatatggtatcatggtctattatggctataagttacataaacatagaatcatcttcatcatctattgggggaagttttctttgaaatgcaaccaaagtcttcctgggttctatgtcacacatagatatctaatttggtatgaaggactctgttaaaacatcctttcgtcttgccactcagtagtaatctaaactcgttattctgaggatatagttcactacaatgggaaggagcatatttacgtactggagtcaggcaaatcagtgtgaatcctacctcaccacttttgagctaagtttaatcagtgtcttaccctcactgatacacactcccatcaccatttcctctactgtgaaatgaataaattgccatcccccattcctggctgccctgagaattaaaagataatgtacaaagggcctggcacatagaaaggatttggtaaattttctttccttttccttctcttgtccttaaaaatatacaacatgaaatgaagtatgatctagccacactgttgaattaaattttcttgcagcaaatcttgtatgctttgctttattttctacctgagaactctgcaaattaaaaagcaagtaaatgactgacttgtaaagaagacaccaaccaataacctttaaattttgtatcatctagaataaaaaagtcacagtttattttccaaatatgtaacaaaaagtaggatgttctgtgatgttcaaactttgtctgtagcaatttaggaacttgtttataaatttggtgcatggctacatctcccaagctgctcaggaagtcttgatgatgatgatagtttaatataccttctttccaaaatattacttaaaatcagaaaaaaatactggaaaatgaaatttattgtatctttttagcttaagaatcacatatctgatgaagccaggctctattcaaactaagtaaagcaaattttttgtggatgagtgggtagtgggtcccatgtttctatgttgtgattatcccaaaaggagagtatatcacacaaatgttattcattgaaggagtagcgagagagagataaatgatgatgatcagtacttttatacatcctcctttcttgtgatcaaatgaataggaaaggtcagtgtgtgcttcattcatatgggaacatctttaaagtttgagttaacatgattaaatatagttaaattcaacaccagcttaaataaatatttcctcaacacctactatgaaacagcaatattctagacactttgaatatagagctgatgcgctatagtccttgtccttggagagctccaagtatacgtgagcaaaagcttaagacagaaacgtcaaatcattgtttcaattctagccatgtgatctaaaggttagtgtcacatttttttaaaagcttagtaatagattttattattttaaatataaatgtaagtgaaaagagtaaatgacaacacaaatgccaaacacaattctataaaaaaagcttttattttctatcactttatccataaatttggcaatgtgtatttcaaaagttaattactcttttttgataaaacaaccgcaataccgttgtcacatttaataatattaacacttatttcttggcctcatccattggttattcactgtcattctctttcacaatttgttctttataatcagattcaaagtaaaatgcgtatgttttgagtggttggtagctcttcagtctacagatgtcccccttcttctctctctctttctccttctctgtcatttatctgttaaagaaaccaagttgttttgtctgttatagttttccacattctggaattttctttttacatccctttgctggtgtttaactttactgtctattctctgtatttaatactccatgtaaattaaatctagaagattggtcatattcatgtttacttatttattcatttttggcaaagagatttcataggcagtgctgtgtccctttttcagaagctatacatgcctgtttgtttccctttttgtgatactcgcagttgttgataaatgcctagatccgttcattcattagggcttttgtgaaatgatgatattttaattttatcattctttcttcctttcttagctagaatatttctataaagagaaaatctcctaatgtaccgttttgttttccagtgaataatacacataaaaagccagaaaaaattcttgacagtttcactttcttgcttattttaaaataataagtgaaataaatattaatgaattccacctcaccttctttttattatctttatagtctcatggggtttcatacatcaggtgtgttttatcctttaggtttattttattcattgatggtcactttgtcccattgttggccagtggaagcatccccagggctcattaagtccttttaatacaataatagcatatgcactaggatagcccctgtgcattctggctgttacaaaataatccaggctaaccttgtacatttgttgtgccaggcctccaatgagctctggttcattttagtggagaatgatatttagaaaccatagtatgtgcactagggttgcttattctacttagttgataagtactactaaataatttcagcacatagagttaagaaatttgtttttcctcataatcttaaaatatactagggttacagggttatacattcttgctgatcctttcaaatcagattcagaacttaacctcatttatcagatttacatttcccttttcttctgagaaattctaatttttgatattcctaagaatggagaaatccagacttattttactcttgtaaacaactttctacaatgcaatagtttatttttttaacttttattttaggttcaggggtacatgtgcaggtttcttatataagtaaattgcatgtcacagggggttggtatacagattattttatcacccaggtaataaaccgccctccaccctcaagtaggcactagtgtctgttgttcccttctttgtgtccatgtgtaagcaatggttagctctgacttataagtcagaacatgtggcatttgcttttctgttcctgcattagtttgcttaagatactgacctccagctccatccatgtttctacaaagaacatgattcatgctttttatggctgcatagtattccatgatgtatatgtaccacatattctttaccaagtctattattgatggccgtttaggttgatgccatgtcttggctattgtcaatactgctgcaataaacatacaaatgcatatatctttatggtagaacaatttatatccctttgagtatgtactaaataataggatctctgttgaatttctgttttcagttctttgagaaattgccaaattgctttcctcaatggctgaactaatttacattcccacaagtagtgtataagcattctctttctctgcaacctttccagtagctgttattttttactttttaataatagccattcagatgggtatgagatggtatctcattgtggctttgatttacatttctctaatgatttgtgatgttgagcatttcttcatatgcttgttggccacttgtatgccttcttttgaaaaatgtctgttcatgtctcttgcctaccttttaatgtggttgtttgttttttgattcttcgtttgtttaagttccagatagatcctggatattagacctttcttggatgtatagttgtcacatatttctccattctatagattgtctttttactctgttgagagtttcttttgctgtgcagaagctctttagtttaaataggccccatttgtcaatttttgtttttgatgcatttgctttgggcatcttcatcatgaaatctttgtcagggcctgtttctagaatgctattcccaggtcatcttccagggtgtttatagttttaggttttacgtttaagtttttaatccatcttaagttgattttttgtttatggtataagaaagggatccagtttcaattttctgcatatagctagccagttatcccactaccattcattgaacagggagtccttttcccattgcttgtttttgtcaaatttgttgaagatcagatggttgtaggtatgcagatttatttctcagctctattctgttccattggtctatttgtctgtttttgtgccagtatcaggttcttttggttactgtagcctagtagaatagtttgaagtcaggtgatgtcttcagctttgttctttttgcttaagattgctttgtctagtccggctctttttgtttccatatgaatttttaaattttttttctaattctatgatgaatatcattatagtttaataggaatagcatacactgcaagagtgtcttattgcaattttagtggaacagaatttgcatggctctaaattctactataatgaacaaaaataatgaataaacatttaccttgtaatattatttaaaatttacaacaaccctatgcaaaacaattatttttctgtttacaagtgaaaaaaattagagctcagaaaggttgagtaatttacacaaggtaacatagtttttaatggggatcttggtcactgatttgtctgacacaaaaagccacagaattaaccaactattaatgattatgctatggtaactgtttaattaatagcactcaccttctgctataattatcaactgagccaagcttattagctagaatcctggtggcagttagaaaaagtaaattgtacgtaaatggctaagaccctgtggtctattatttcacacatgctatctaattatatatgcatgtgtatataacatgcaggccagacctgagtaaagtcaataaaatttagcttgcgggatcacatcaattgtttgactgtaggctctttaagcaatactaaaaatccccctgatctgatatgacatctggcgtgtccctcagaggaaacatagtagtctcccaggctgtgcttttaaaggcaattagtaggtttacaaattctatttttacattttgtattaaaagtatagtttggattttgcattccagaaattgtttgaatactgcaatgcagcagatttcattggttttaaagttttagggaagaaacaataatgttcactttcaatatgattttgaagtgtgtttcagcagaaattataaatgttcagggtactctcctaaaggtatcacagtaagcatttaaactgaatagatgctattggtacccctgtaacataatgaaaaatgggcagccaccatctgaccgcaacagagaatctgactcttccccttccattagcctctgggaaaaatggtatgatcgcctccaacagatcagagagggttggttatggtcgtatctttaagagtgaaattttcaactcctaagacaatgagaggtctgaccatgagtccttctccaccctccagacgtgggaccacacaaggacttccctgctactgagggacaagttcccagtggccggccgcttattgcacctatctccagcattccttatgaaaaaattacttgtaccagtctatgaaaatgaatcataaagctagtgtgactgcaactattagatacattccattccatgaataacactattttatatgaaggtttgaggttaaaagggaaaaaataggcaaggattatgaaaatacaactttctgtcatagatttcagcaggtgtcttcttacaatacaggacatgtttttattacgaaaacaaagaaagggtgctgccatagtagaattccactgcagaggatgaatatactgctgggtccatttggttgtatcgtagttcaataacgctatgtgtatgtgtgtgtgtatgtgtctgttaggaattaggagagacagattaaggatcagttttaacgatgcatttcagctttttggtttagacaacttaccatgcttttcactctagaaacactttaaggtagttacaagatttctctactttacattttatatcagtcttaataaatgtgatatgctttcacatgcagtatattatttaagcttcacaacaattggtgtgaggaaagcattattgtaatccccaatttacagacggaaagttgtggctcaggaagattaagttagtttgcaaaagtggcacagctagtaagagtgagagctaagatttaaataagacattttggttcttacaagcccatgcactacttaaccttcatgcagagtagagtacaaaggctcagagaagatacatcatttaccttaagtcagttatagcaaaggctcaattccagataattttgaatccaaaaccagtgtttttttcactatagcaaggagttccatagatagcacagaataaatatatgaaataatttcatttacagcaccacttacatactttatatttacagcacacttcgtaacatatagattaatacagcaccaagtgatgacaaaaaacactaaaataaggcaaattaaattaaaaatgcaattttaatgggattaaacagaggatgctttcagtagaaaggcagttttgacacaaaacagaagaacaaagaaaaagaagaaagtgcgttctagataatatttttaatattacattcaagagcactggagaagctgtcctaaaatggagaggcaggaaactatctaaagtattatggtaatgtttctggatagaatattcagtggatcttgaagaaatagaaaattgccttagaaaagttttcattttattggaattacaaaatctcctatatatagctttacctaatttcacttaaaacttttctaagtaacaggagaactctttaagataaaaggtgtcagggtcacctaacacacatttgcagtatgctcttctaagaggaggtgtggttgtgctattcttattgcctctaagaaaaataagatctgtacaaggttaaattgaggtgagctcactcttaaagagattttaaatttcacctggaaatagaaatgttaaattttcgaatatgctcctacatagatgacacaagctatacccatttcaattaggaactggagaaccagagtctgcaggcagtgtatgctcagataaatgatattgattctatgtatattggctacatttcttcttgcttacataactacatgtttctggccaacttgaatgtcaacctcactttttccacttatgacctatttcttgctagcaactccattcccatgctccatgattctgtctgtggccttgtatatccccagatttattcaaattgcccatttttcatgatttacacgttcagtcctctcatcttgagctgcatcttcctatacagcttctcgagaaacattagattttttctttcttctttctttcttttctttctttcttcttttcttttcctttcctttcctctctcttaccttcgttccttccttcctttcctctctctctttccttcctttcctctctctctttccttccctccctccctccctccttccttcctttcttccttccttccttctttctctctctctctctaattttgagaaagggtcttactctgtcacccagactggggtgctatgatgcgattataactcactgcagccttgaactcctgggcccaagcaatcctcctgcctcagcctctgaaagtgctgggattacaggtgtaagctactgtatccagcttaggcatccatttttgccattcccccagcttggttctatattcattcttctctttacaaagctgattacattgaaagattaccagatactcctcccagaaaagtggaagaagggatctgtgtgtgttttggatgataaggtaggaaatcccgaactggacttggaaacaaaggatcctatgctaataagcagaggaccacaaaataaaaaagttttcagtggaaactgaggtaatctagaaaggtaatctagaaagagataatctagacacaaagccatgtgatggaaataagaaaacaatattaaatcaagagtatcaatccattgatccatctacttattcattccacttatcatgtacaagatactattcaaggaatcttggagattctttctgaaattctgactactatacctcaccaccttgaataatacctggcaccttgtgggcactgtcagccagatcttgttgctccattacccaaaatctcaaagtcttcccattaacccatagtctagtttatgacaaaatgattcaaagtaaggactggaaagtataaatggaaaaataaaatcttacttaaacaaggctatcatgtttaagtggctgtctaaagcagtgatttttacagctcgttcccagttgtggtttaggtgcagaaattgcaacatataaggttccatgcaagatgaacaacagtgacaatgtttatgtagaagcattttttaaataaaatgctatacaagtggaagctattaacatgcagaaccagccaactcctttgtgtcttatttttcttatctttccctattgatagcatttattgttcactttaaaataaaaatctgtcacaatgtgacaggctctatagggcagctcagaaaaatattagaatgctgatggtcatagtgcaagctttcattctagcttatatgtcattctctgaatctctgttatgaacagaattggaaaattcaggactgaatttgtttttgcttttgcttttttcaaatgttaacagggtatccttctcaaggaccttgtcaagttattctctcaagctttggtttggattctgaatattgaattcaggaaattaagtcctccttctctttttgttaagagatttagccttgtcaacttttccattaagtggcaactcaaggttcagagatcagagagtgagccttctcagcaggagggcttaataagattagaaaaagtaagactctttcaacactggcaaaagtaggaaggtaattatctcatgaagtcaatcagtatacataatcattgcagattatttagacaaaatagcctctctgtctttacattagggatttttgcaagaaatactaatgccgttttattttatttggtcaacataagcccagtctcaacagtagatatccaaatgtttaaaacatcttgatattttaacattgcatgacacctgactttgggttagacagatgttccattaagacttccaggagaccagcaagttatttgaatcctcaattattgtttagtttagcacacttatttccctctctccacatatttttaataatctaagattggtttggcagttttattatgtgtatcttcagctttgccagattcacttagagataagcatgaaatatggtataaacaaatataattcttacaccttgcataaatttcttgtgtgtgataccgaaaagcagatgtaagggaaaaacacgtcttaaaatgcaatccataatggataccatctaacgctagttagaatgatgatcaataaaaagtcaggaaacaacagatgctggagaggatgtggagaaataggaacgctattacactgttggtgggcacttaaattagtttaaccattgtagaagacagtgtggcgattcttcaaggatctagaaccagaaataccatttgacccagcaatcccattactgggtatatacccaaaggattataaataatgctactataaagacacatgcacaagtatgtttattgcagcactgttcacaatagcaaagacttggaaccaacccaaatgcccatcagtaatagactggataaagaaaatgtggcacatacacaccatagaatactatgcagccataaaaaaggatgagatcatgtcctttgcagttacatggatgaagctggaaaccatcattctcagcaaacttacacaggaacagagaaacaaacaccgcatgttctcactcataagtgggagttgaacactgagaacacagggacacagggagagggaacatcacacactggggcctgtcagggtgtggggaactatgggagggatagcattaggagatatacctaatgtagatgacgggatgatgggtgcagcaaatcaccatggcatgtgtatacctatataacaaacctgcatgttctgcacatgtatcccaaaacttaaagtataatttaaaaaaaggataacccaaatattgcatgggacatacttttcttaaaaatttattgtttattaatacaaaacaaaataaaaaatacagtccataatattctaacaaaaatgtttcttagaattttttttttaggaaatccttctcatgttcaccatgtttgggtctacccttccaggcttcatatttatacaaagatgaatataagtgtgaattctattcttattgaaggaatattgttcataatcacaaagaaaggagttttcaggatggttagtctctaaataaacaaagaaaatgatttagcagagtggatatttctaatgtaaagaatagtaaaatgaataaaaggcataaagttattttttaaaaaagaaaacactttttaattgttcattgtgtttagcagatcataatctggtattatccacagtcattgagcttttgtttgtttggggtcaggattgcatttactgttaactgatttgctcttatgtactttatttttctgacaacaaaaattcccatgcatagtttaagtctcttgtatataaaaacatttctcaaagttcaaaggaaagttttaatttggaaaaattctgtttagataattctttcttgatttttcttgccaacttattcaatgtattttttgatcaatgaatcaatgttaatccttttacattattctctacgtctacattcttaatgcctctttcctgatttcacaaccacttatcaaaacaaacagcttatcctgtttcattgctctgaacatccttcataattgtcttatgatatttaaagttgaagattttttacagatgaaatacgtttgtctttaaatgtgtcccatttcctcaaattctctgcctccaatgaaatctgaaatctaatttaaaacaaagttcaaaataagatctgtacaccatccttgtcagtagcttcactttgaagttttatgacccactacagcctagcttttttaacaggaataaaaaaagtaaacatcagaaagagagtattctagctcaaagtaaattgggaagtcataagaaatcatctacctgctttaagtgacttcatacatttcagtcttatcaaattgcttttcaaaatgatgttggaatttaaaggtttaatttcatggccacttccattattattggaaatgctgaaaataaaaatcacattataaccaatgacagatccatattttagtttccaaaatggaacattctggaaatgtacatctttaataaatttgaggattgattattaatgcaatggacgataacaatgtaggatgaatagggaggattattgagaaccaacatttccttgggaggaaatgattcaagtgacataatgttctttctctaataagtttttaatgttactcatcagcaaaatacagccaatgggatgtattgatttcagcaaagtatgatatgatacttttggaataaaggtaataagtatttactgagtaacggtaacattaagaagattacttaagcatagattaataggtatctatcttgttgaataaagcttatactatagcactgcattttttctgcctctgttgagtaccacttaatcattgatttgatgagaaaaataattttcaaatcatataccaacttttaatatgaagtttgatatcaaaagctggaaatatttgttagagtgatattctagaaaggttaaaatcaacagaatcaaccagaatcaacaaaggaactgttaaaggtatataaaaataatccaagaattcttacatagtaggtttaagaaaacttgttttggtagcaggttttacataaaaaagatttagtggctttatttattcacaaatttgattgatttattcattcatttaataaatatctatcaaaaacataccatgtactaggtcctgaattctgggtactagaaatatagtagtaaattagacaaataaggaatcttctacagtttatgttctggtagcctgagacagaaaattaataagtaaatgaataaacaagataatttcaattagaaataagattcaaaatatgtgaattagatggagtagtgtacgggaactaatttaaactggtaggaaatgagcactgaagaggtggtatttttgctctgcttttaaaagaagacagatctgatataggaaagtcggggttaaagttttaaagcagagaaaatatcaggtgcaaaaaccctaaaggaaaagatgggcttggtcaagtcaaagaatagaaataacaatggtttcctaaagtcagataatgtaaagatattgtaggtattaataaagaagtttgatttcatcccaagggcaacaggaagattttggagcattttgaatagggaagtaatatgattagatgggatctcttttgaatttttaaaagattattctagttaccatccagagaaaggaatgtaagagcccaagtgttgaattagagaaatttattgagtaatcctggtgaaaaacaactgtggcttagattagaaaggtgtccatagaaaacaggaaaaatggatggatttagaatagaatctgggggtgaatcaaacagagtgaaagaggagttaaacatgggggtatagagaagagttaagggtaacccacggttataggaattgaagaacagggtatattgtagtagaatttactgaaatgaaggaagtttacagagggaaatattaagtttaagataccaactggatattcaaatgtattttttaagtaggtcactcaacattaacgtactcagcacaaatcatgaccaatcatgtaatgtactcagcacaaatgatttgaccattggaatggtcaaatttaggggcatattttggagatgtcagcaaattgatgatatctaatgccattaagaaaacgtaatgagaaagtgtggaagtagaaaaatgaaggacataggactgaggcctgtgatatttctatattttgaggttaaacaaagcagtttcagaaggaggaataagtgaataaagccaagagagtatgatgctgcagagatcaagagaagagattgttcaaagaattaaaaaaatgctcagctaagtaaaatattgctgacagcttaagcaggatgaagaaaaacaagtaattgtaggactcttttggtgatagagggcgagataatacataccaactttccactaataataactaaaagtggtgagtataatattaaaatatcagaaatattgattatcttggcacaaattgcaaaagatatgcaagacctgcacactgaaaacaacaaaaaaattcattgagagaaattaaaagagacgtgaataagcggagagcggagcgagataattgttcaacttttggaaaattcagtgtttttaagatttttctcacattgatccatgccttcccaatttaaagtccagcaggctttttttgttgttgttaaaaattgaaaagccaattctaaaaggcatgtagaaatgcaaaggacctagaacagccaaaacaaattcgacatagaagaagttgaaagactcatattacctgacttcaggagttattttaaagtttaaatagataaaacaatgcagtgttgacaacaagagataataggattcaaaaaacagaatgtggagtctggaaataattccacacatatatgataaactgtttttcagcaaaggtgcaaaagggccaggtacggtggctcacacctgtaatcccagcactttcgaaagccgaggcaggtggatcacttgaggtcagtagtttgagaccagcctggccaacatagtgaaaccccatctctactaaaaatacaaaaattagccaggtgtcatagcaggcacctctaatgccagttactcgggaggctgaggcaggagaatcacttgaacccagctgtcaaatgttgtagtgagctgagatctcacccctgcactcccgcctgggcagtgcaaagggaaagccaacagagaaagaatagtgttttctataattactactgtaactattataaaaccatattccaaaacaagtgaatttcaattcatacattgcatgatttaaaaaaatttacttaaagtgtacaatatgcctaaattcaagaacaaaaactatcaaatttctaaaagaaaacataggacaaaattgttcttaggtggtaatttcttagttatgacataaaaagcaagatctatttgaaataaataaattgtacttcattaaaattgagaacatctgctcttctaaagacacttaagagaattaaaatataagccgcagacttcaagaaaatatttaaaattccatatctgagaaaggctttgtatcaaggatatatttgaaagaggaaagcaaactcaaaactcaataataagtgtgcaaaactcaagagagagctggtcacaagacatgaatagcaactttaccaaagatttgttgttggcaaaaaaatatatgaaaagttgcacaatgatattattcatcggaaaaattataactcaaaccaccatgagctaccactaaacatctattaaaatgtctaaaattaaaaaaaattgaccatatcccttgttagcaaagatatgaagcaactgaaactgcacccaatgctgatggagttgtaacatggtacaaccactttgaaaaaacgtaacacttttaaaaaattatagatacacctatcaaatccagccattctactcttagatgtttactcatgagaaattaaagcaaacatttatttaaaaatgcatacagggatgtttatgtcatctatatttttaatgtccaaacttataaacaatgcatatgcctatcaacaagtaattgggtaaagaaattgtggtgtattcatataatgtgatattactcagcaatagaacagtagaaagtattaatgcacacaacaatatgaatgaatcttaaaattattttaagtgaaataagccagatgtaaaagaagagtttgtatatacttttatttatataaaattatttaaaataaatgctaatctgttgttacagaaagcagatcagggaggatgcaggaaggggtagcagggaggaaacacaaagctgctcaaggagacttttgggggtaatttacatatgtgttaccttaatagcagtgcagtcttataggtgtatgcatatatcaaaacttgtcaaactgtgcggtttattatatgtcaattaactcaataaaattatctttgaaacaaatataaaatcttccttggcctatggaaatgagatctaaggagcttggagacaggaagattttttaattgtcccctttaaaattttggtatttgaactgtgtaaatgattttcctcttcacagcataattaaccaaaattttctgtccaagctcctgaatatgagatagtgaccttggtatcatccaacactcacgtctctctctctctcttttttttattcacctttctttagtcaatcacaaaattctgtcaattgtgccttagaatcttaatatgaatttgttccacccctctcaccgctgcttttgtcctagttcatcgactttggtaaatgtcaccttcttggtgaagtcttctctgatctttccacacagatgattgccttggtctttgctgtatatcttttgacagttttactgtggcagactttggaatatttattgtgcggctctaagaagaaaatttaaaaatgggcttagctggtaggaagagaaacaggggtaaaggggagcaaatgttccgagaaacggggtccacaaaaacagctcacttgcacccaaacatcctgttacaatcccttagctcatggcccacctgcacccaagcatcctgttcgcaagcaatgagaccaagcagcacaaccttacaaaacttccctccactcctgcctctttgcagacagcttttcatctgctgcattactcgctgttttcttgcaacatatctcccccttttctctaatgaatctgcctttctaaactcattcctctcttggtccattcttttaccactcacgtgccagcctcaggcagtcattgaccatgacatttattttaactttttgtttttatgcacatttgatttgacaaaaatgtctttttaaaaacaatatcttattcctatttaacaagtatacgttatgacaaatgtaaagaatagttaaatgaaaatatttctcctggaataatttgcaaagaagttacagctatttttatatatttgaaagataaccttgaaagaaaattagacgaatggctaactagaacaaccaatgcagagaagtccttaaaggacctgatggagctgaaaaccaaggcatgagaactacgtgacaaatgcataagcctcagtagcccgatttgatcaactggaagaaagggtatcagtgatggaagatcaaatgaatgaaatgaagcgagaagagaagtttagaaaaaaaagaataaaaagaaatgaacaaagcctccaagaaatatgggactatgtaaaaagaccaaatctacgtctgattggtgtacctgaaattgacggggagaagggaaccaagttggaaaacactctgcaggatattatacaggataacttccccaatctagcaaggcaggccaacattcaaattcaggaaatacagagaacgccacaaagatactcctcaagaagagcaactccaatacacataattgtcagattcaccaaagttgaaatgaaggaaaaaatgttaagggcagccagagagaaaggtcaggtaacccacaaagggaagcccatcagactaacagctgatctctcggcagaaactctacaagccagaagagagtgggggccaatattcaacattcttaaagaaaagaattttcaacccagaatttcatatccagccaaactaaacttcataagtgaaggagaaataaaatactttacagacaagcaaatgctgagagattttgtcaccaccaggcctgccctaaaagagctcctgaaggaagcactaaacatggaaagaaacaaccggtaccagccactgcaaaaacatgccaaattgtaaagaccattgaggctaggaagaaactgcatcaactaatgagcaaaataaccagctaacatcataatgacaggatcaaattcacacataacaatattaaccttaaatgtaaataggctaaatgctccaattaaaatgcacagactggcaaattggataaagagtcaagacccatcaatgtgctgtactcaggagacccatctcacgtgcagagacacacataggctcaaaataaaggggtggaggaagacctaccaagcaaatggaaaacaaaaaaaggcaggggttgcaatcctagtctctgataaaacagactttgaaccaacaaagatcaaaagagacaaagaaggccattacgtaatggtaaagggatcaattcaacaagaagagctaactatcctaaatttatatgcacccaatacaggagcacccagattcataaagcaagtccttagagacctacaaagcgacttagactcccacacaataataatgggagacgttaacaccccactgtcaacattagacagatcaatgagacagaaagttaacaaggatatccaggaattgaactcagctctgcaccaagtggacctaatagacatctacagaactctccatcccaaatcaatagaatatacattcttctcagcaccacaccgcacttattccaaaattgaccacatagttggaagtaaagcattcctcagcaaatgtaaaagaacagaaattataacaaactgtctctcagaccacagtgcaatcaaactagaactcaggattaagaaaatcactcaaaaccgctcaactacatggaaactgagtaacttgctcctgaatgattactgggaacataacgaaatgaaggcagaaataaagatgttctttgaaaccaatgagaacaaagacacaacataccagaatctctgggacacattcaaagcaatgtgttagagggaaatttatagcactaaatgtccacaagagaaagcagaaaagatctaaaattgacaccctaacatcgcaattaaaagaactagagaagcaagagcaaacacattcaaaagctagcagaaggtaagaaataaataagatcagagcagaactgaaggaaatagagacacacacaaaaaaaacccttcaaaaaatcagtgaatccaggagttggtttttagaaaaggtcaacaaaattgagagaccgctagcaagactattagagaagaaaagagagaagaatcaattagacacaataaaaaatgataaaggggatatcaccaccgatcccacagaaatacaaactatcatcagagaatactataaacacctctatgcaaataaactagaaaatctagaagaaatggataaattccttaacacatacaccctcccaagactaaaccaggaagaagttgaatctctgaatagatcaataacaggctctgaaattgaggcaataattaatagcttaccaaccaaaaaaagtccgggaccagatggattcacagccaaattctaccagaggtacaaggaggagctggtaccattccttctgaaactattccaatcaatagaaaaagagggaatcctccctaactcattttatgaggccagcatcatcctgataccaaagcctggcagagacacaaccaaaaaagagaattttagaccaatatccctgatgaacatcgatgcaaaaatcctcaataaaatacaggcaaactgaatccagcagcacatcaaaaagcttatccaccatgatcaagtgggcttcatccctgggatgcaaggctggttcaacatacgaaaatcaataaacataatccagcatataaacagaaccaatgacaaaaaccatatgattatctcaatagatgcagaaaaggcctttggaaaaattcaacaacatttcatgctaaaaactctcaataaattaggtattgatgggacgaatctcaaaataataagacctatctatgacaaacccatagccaatatcatactgaatgggcaaaaactggaagcattccctttgaaaactggcacaagaaagggatgccctctctcaccagccctattcaacatagtgttggaagttctggccagggcaatcaggcaggagaaggaaataaagggtattcgattaggaaaagaggaagtcaaattgtccctgtatgcagatgacatgattgtatatctagaaaaccccatcgtctcagcccaaaatctccttaacctgataggcaacttcagcaaagtctcaggatagaaaatcattgtgcaaaaatcaaaagcattcttatacaccaataacagacaaacagagagtcaaatcatgagtgaactcccattcacaattgcttcaaagagaataaaatacttaggaatccaacttacaagggatgtgaaggacctcttcaaggagaactacaaaccactgctcaatgaaataaaagaggatacaaacaaattgaagaacattccgtgctcatgggtaggaagaatcaatatcgtgaaaatggtcatactgcccaaggtaatttatagattcaatgccatccccatcaagctaccaatgactttcttcacagaattggaaaaaactactttaaagttcatatggaaccaaaaaagagccctcattgccaagtcaatcctaagccaaaagaacaaagctggaggcatcacactacctgacttcaaactatactacaaggctacagtaagcaaaacagcatggtactggtaccaaaacagagatatagatcaatggaacagaacagaggcctcagaaataatgctgcatacctacaaccatctgatctttgacaaacctgacaaaaacaagaaatggggaaaggattccctatttaataaatggtgctgggaaaaccagctagccatatgtagaaagctgaaactggatcccttccttacaccttatacaaaaattaattcaaggtggattaaagacttaaatgttagacctaaaaccataaaaactctagaagaaaacctaggcaataccattcaggacataggcatgggcaaggacttcatgtctaaaacaccaaaagcaatggcaacaaaagccaaaattgacaaatgggatctaattcaactaaagagcttctgcacagcaaaagaaactaccatcagagtgaacaggcaacctacacaatgggagaaaatttttgcaatctactcatctgacaaagggctaatatccagaatctacaatgaactccaacaaatttacaagaaaaaaaaccccatcaaaaagtgggtgaaggatatgaacagacaattctcaaaagaagacatttatgcagccaaaagacacatgaaaaaacactcatcatcaccagagaaatgcaaatcaaaaccacaatgagataccatctcacaccagttagaatggcaatcattaaaaagtcaggaaacaacaggtgctggagaggatgtggagaaataggaacacttttacactgttggtgggactgtaaactagttcaagcattgtggaagtcagtgtggcgattcctcagggatctagaactagaaataccatttgacccagccatcccattactgggtatatacccaaaggattatacatcatgctgctataaagacgcatgcacacgtatgtttattgtggcactattcacaatagcaaagacttggaaccaacccaaatgtccaacaatgatagactggattaagaaaatgtggcacatatacaccatggaatactatgcagccataaaaaatgatgagttcatgtcctttgtagggacatggatgaagctggaaaccatcattctcagcaaactatcacaaggacaaaaaaccaaacacatgttctcactcataggtgggaattgaacagtgagaacacatggacacaggaaggggaacatcacacaccggggcctgctgtggggtgggggaagaggggagggatagcatttggagatatatctaatgttaaatgatgagttactgggtgcagcacaccaacatggcacatgtgtacatatataactaaactgcacgttgtgcacatgtaccctaaaacttaaagtataatttaaaaaaaattaaaaaaagaaagctaccattttaaaattgacatatgctggggattaataagaaactcaaacacctccacaggaaaaattaaataagccaattaaaagtgggcaaaagatctaaatggacattacccaaaagaagacatacaaatggcaaacaggcatatgaaaaaatcgtcaacatcactaatcatcagagaaatgcaaattaaaattataatgacatatcatatcgcccctgttaaaatggcttttgtacaaagacatgcaataacaaatcttgatcagaatatggagaaaggggaacatgtgtagactgtaggtgggaatataaattagtacagtcactgtggagaatagtattagaggttcctcaaaaaaacaaaaataaaactaccatataatttagcaatcccacttctgggtatatattcacaagaaagaaattagtaaagcaaagagatatgtggactcccatgtttactgtggcactattcacaatagccaacatatgaaatcaacctaagtgtccatcagtggatgaaaggataaagaaaagtcgcgacatagcaagactctgtctcaaaaaaaaagaaagagaaaagtcaaacgtatatacaatgaaatgttatttagctataaaaaagaatgagatcctgtcatttgcaataatatgaacagagctggaagacattgtgttaggtgaaataagcaacatgcagaaagacaaatgttgcatattctcactcatgtgggagttaaaaattttaaaaattggactcacagagatagaaattagaatgatggtcaccagagactgggaagggtagcagggagagcaaggataaagtgggaatggttaatgggtacaaaaatacagttggaataaatattacctactatttggtaacacaatagagtaactatagttaataatttattgtgtattttaaagtaactaaaagagtagaatttgaatgttcttaacacaaagaaataataaatgcttgaggtgatggataccccagttaccctgattggatcattacacattgtgtgcttctatcaagacattacatgtacctaaaagattaaacgtttcagttaaaacaaaagtcccttttaaatactatgcccagtccctacccttatgttacatttggacaaaggtaaccagtgttgtgtgcttgatgtatgtcctccagactgtaaaataactttctccacagcttaacttttccaaaaatgaaataagcttccccatgcagtgtggaagggagttcctccatcattgtcaaagataggatgtccaaatgtagagtcagaaagactctagatgcaatgcttgtattagttagggatttgaacttggtcacaagtattgattctgagtctatcattatgtaagtgcatgtttctaaaactacaaataggcatactttgaccatggtaactttcttaaactggcccaactccttagaaaccaatctttcagaactttaaattttacttaagtgattttttaaaaatcctcaataaagcatcaatttccatttctcagtcttgtcttatactaattcttgagagtctcatacttttaaaatcctgcaagtgactagccatagaagaaaaataatgttatagcatttctaataacccctttctctgagtgctttgaatggcactaagttgctctctctctctctctctctctctctctctgtgtgtatgtgtgtgtgtgtgtgtgtgtgtgtgtgtgtgtgacagagtctcgctctgtcacccaggctggagtacagtagcactatctcgtctcactgcaacctccgcctcccgggttcaagcaattctcctgcctcagcctcctgagtggctgagattacgggcatgcaccacgacacccagctaattttttgtttttttcgtagaggcggggtttcaccatgttggtcaggctggcctcccactcctgacctcaaatgatctgcccgcctcagcctcccaaagtactgaggttacagacatgagccatcgcgcctggccaagttctctgtaactgatctggttataaataaacaaacatattcagtttaatatgtgactttttctcattatggacactaatgtctataaaactgtcctattcactgtgaatgcatagatgtttaaaaatatcagagatactgaacagttccaaagatagtattaatactaccaaaatgagaacaatcgctatatatacatcagcattcaatctgccacaatagaataaaaaatacaatttctcctagaaaaggggaattttgccaactttttgctctttaagaaacaagcagaaatacatgttcctaaaattctcatctggactcaaaaagactgctagatctttcacaggtgttttttagtttcattagttacctgcaccctgagaatatccaatgaatctagggtacagggaccaaattatcatgactgtagtctgatgtgagcaaagattgtaattaaagtacactttggatataattgcaaatgtgcattttggtttttactccttgccttctaattagattccaatttgaatctgtgctcctgcatcagttatgcttgtcccgtataaaaaaacaatattatatttgtatacaaataattttgtccaagccagccaccctagattttgatgcaaagtaaaacaactaaatacaatttaggcactttaacagtgagttgttaaaagaaaaaaaagcagagctttgtaaattgatcccatatattcttaaatttaataaagtaataatttaataaaatggagaattgtattttctactttctttgcttaataaagctttagccctccccagttaagaattgtcaatggctagtcaatacctgcaagactgattttaaattcttagtatggcattcatgacctttccaagtttggcctctactcttactatttggctaagaatactatcactgtttcctgaacataacctatatcttctgacctttgtgttttgggatagttatcgctataacaaaatatttgacagtatatgctatgtgccatgtactatgccaggtgctagaaatattaaaacaaatagccatacttagtaacttaaggaattgaacagacaaaaagcagataagtgtattaagaaaaacaccacatagtatgggcaggtgctacaataggcttaagtacaaagtgtaataatggcaactcaaaataacagataaccttccatatcctttacttgaaatatttgtttggtatatctcttctgattctttcaagaaggagcagatccatctctttatattctccatagcacattgcatatatattcctctattgggatatttttcacattgtatcctaattatctgtaacgctataactgtttccctggaaaatatgtcacaatctcaaaagcaggtggcctgtgttagaccgtatgctgccaggaagtagcaaagggaaccaacatcactgagtcttcactatgtgctttttatgatcataatatttttcataaattattttatttaatcctcacaagaatctattgaaagggatactattatgtcaatattttgcatgaggaaactcagactcagaaaagttgtcactggcatcaaattacacatctactaattttaccattaagctgtatgatatccaaacccaagtccttgacactgcatcgaagttatgattttccaacccctaaaatattgtttgactcatagtagttgctaaataaatacttcttgcatgaataaaaaattaataagacgaatgtattgataactttgcatggtatagtaaattgagaaaatagtgttacaataggtgtgctattaattagtttggcctatagaatatatttgcacatttcaaatatatatatacacatatgtatatatatttcttctgtgtcttctgtgtctcctttgactgtctgtatataatgatatacccattactgtatgtaccttatagctagcctaacaacaaaatacataaataatatataaatatttatctgtatataaatatatattacatatacgtacaataatgagtatgttattatatgcagagggtcaaaatgagacacagaagatggaagaccttaaacacaatagtaaataagtaatagagcttagatgcaaacctgcataattaaacccaaaagtaaccattatactacttcacctcaacataaataagaaatattgttatcaccactggcaatacaaagggataacaactcctttttgttttccttaatgtactaagtaacaggacaaaaaagtttccatacatagcattcagttataaaagtaactcgttgctattaagtgcagcaaaaagataaattgttcacatacatttagcattagcttcatgaataagaagcagcttttatctagtatggactattggctctgagatttttcctagaaaaatatactgctttctgaaaatacacaatattattctgaattaacaatacaacccttctacttagaaaaggactttatctaagaagcatgtgatactagaaggagaaacatacttaggattaattgtatgaggcacaggttgattattgtattgaaaaatgcagtgtctgattatctcctccaggtgaatttaagctttgaggcaaagtactatgaaggagatacacaatgaattcaaggtatttagtacaaataatctgagaacacaagacagatttctatttgtgttacaatcgttgatcatatgttgacttgcacattgaaatactctatcacataagaaatatacagtaggcttaattaaaccgtaaccaataaagaaagaagattgataaaataatgataagtgttgaagacataaagagtacatgcaggtttatttttatcttctctctagtattgcatgtttgaaatttttcataataagtttttaaaaagaaaaataaatgttctcttgatttcccaaagtctattttctttcattttctaattttactttttatttttattcattttattttatttttgagacagagtctcactttgtcaccaagctggagtgcagtggtgcaatctcggctcactgcaacctccacctccagggttcaagcgattctgctgcctcagcctccagagtagctgggactacaggtgcatgccaccacacccagctaatctgtgtatttttaatagagatggggtttcaccacgtttaccaggatggtcttgatctcttgacctcgtgatccgcccacctcggcctcccaaagtgctggcattacaggcgtgagccaccgtgcacagccacattttctaattttaaactttttagttaaaaaataattttgtaaagtgaaaaaattaaagaggaaaaaatagaaattaaaatactttagttgccagaaaggtgattaagaaaatgctcttcatacacatgaatataaaaattttttaaaagtagttgctgacttacatctggttatatttatttatcaaaaaattactatttaagggaaaattcataacataaaactttctacctaaaccgttataatgttgaggctgaactttcctatgtagttcatgcctgaattgtctcaacaatgactgttgctgccttcaataaaatggtagcaaatttaaaaaatggtagttctaaaaacttgtcaatctgagcaattgtttgtgttaatttctttgtccccccaaagctaaaatttattttcttaaatatccctgtgattgcttgcaactattgagatgaaaaaagaaacaatttcttagattgaaaatacagtagtcaacccagtatttatctccagatttgctgatttctgcttgacagtaacataataatggaccatagaaaaactagttgtgtttttagaacagactcttttaaaccatgtgattttttttttttgtcatcagtaaacagaattaatgtttggctctgcacattttaaagctagttgaaataacaatacattgcagaaaaaatgggattttggtaaggattaaatatgattgcttatgaaaataataagtataatgtgttgagaatctaatgtattccaagaattttacagaacttgtctctaatttttccaacaattctctagatgaatatttgccatctggagaactccaattgcaaataaaaaaccaagttcagtaggttgccccaggttatatagttaataattgctagacctgaaatgaaattcttatctttgcccttctgactctttctattctgcaacattgtctctaaggaaataatgaggaaattatcaaagtacaaatgcattatattagctataaatttctttattaagggattagggcagagacaaaaaagcattcatcagtggtaacatgcagtctctaatcttggttccatcacttctcttttcctcttaaatgattcataacaatgcacactgctgagagaatcttttgctccgggaataaacaaccaggaggtatacaattcccaggccatttattatccctatttttgcaacatctatcgtcaattaagtcctattaaatgattacaaaggtaactatttagttacaattttgttgaatttgttagcaaacttctttgtgtcatttgcttctcaaatgaagagactgtagcaacagtgaaaccatgtggcaaactggcattgggctgcagttcattagaatctgaaaggcaggagaactcatccacatttaaaattctacatttgaattttcgttgcttatgctgacaatcctttaaacacaaagtcataaatcagcaggcagtgctagggagccacctgctggaataactggctgaattttgctgccatgtttccacaaaatataaattcacttaatattaattcaattagaaagttgtcaaatttagggttccttttgccctaaatagatatctttcacaaaaactttcaaactacacttggtaatggtaaagagcattattatatatatttttaaaaaggtaggaagcatgaaataagaagaaaaaatattcagtgaacattattatgtaattgacatgtgaaaatacaagagatagccaagaaattccagtgacattagtcagattttcaaaagaaagttacctattgcttcaagattgctgtatcattcatttgtcaaggatattcactgtaacaattttacccagaaattatacttaaatagtaatttatgtaaatgataatattttgttaatattaaaatgaatatgtttttaaaacctgcttgcattaaaaccacaggaggtctaatttggaatcaagtgatgcagattctttttcttttccaagctgtttaaaattaacctctgttacaaacttttacctttaatattgagtggatgataaattaaagtttttagctaaaaattgattagtatagtatttttctagactatgttgttcagaagtctgtgctaaatatagccacccattttccagcctttgctatagagtatgtataatgaacatgaaagaaatgttctttgatgatgcttttatgttgcctacggttcatcattctaaatatgctctccgtgtgcagcatagaaagtaagtaaaaaagataggaaagattgatctgaaatgtctactatctccaagacatagcctggagttatttttcttactggttccctgttatcagtttgctttcttatcactttctttatcctctaaagagtagcatgcctaaagattctatttaattaagagtttcagttcatgaaaactatgattttatttataactaagtattctcaagatggtgggaaccgtaggtaatatgggtaggtggggagagttctgtaattcctgttcagctgacactatttgataagtcctttaccaactgcagttgctttatttcagattccctttgactcaccatggtagatcctcacttaaagcattttagaatatatcaagtcatttaccttaatctatgtgacacctaacaacaaccttgaaagatgtgattcttatctttactctacaggtgaggaatgattttcagaggagttaagcaaattgtgccatgtggcatcctagtaaaagcctaaggagagattcaagaacttgccaagaccacgctgaatcccactgaaatatccaagttcttaaaaagagcaaaccacttttctgtgtgttcattttgcacccttatctctgtgcttactacattttaatcacccattttatttctctccaaagtctgtatgctccttcaaaccataaactcctttttaaaaatactctcagcagttggcatcaaacctgatattcataaaatatgataaattagtgcttgttgaaagtttgttgaaggagattttattatttttaaataacatacatgagatcttatatttgtttattttatgtttcatgggagtgtagtagtttagaatgagaaaggacaagaaaatgatgtttattgagaccctactatatgtcaggtcctctgagagtacttaacgtgccagctcctatgaaggtgccttagtcacctaaggtactaatattatgtatacattagagacatgacaccatacatacatagaggccataatatacatatgttagagacaaaaaaaaaaaaaaacagaaagacaaagtggttagataacttactcttaagttacccaaagcattctaaattatttctcaacatttcttatcttctttgaaaatctcatccactttcgtaatctcaaccatcaatcacctgtatgcaagtgatggccaaatttgcgtcaatcactcctcaatacctcacactcccaaattgcaattgtaaatatcctgactattctcaagaaataactatcaaataaccatttgaataaatacctatactggcagacactgtactactaggtgctgtatatctacagtgaaccaaacaatctctttctgccttcagagattcaggctaatagaagagttaagcaatacatattgtcatgaaatccatgaacaagcaatcttctatgataggacaatcggaggagtccctaaagggttaaaaattaacataagatctgaaagaagccaaggaatcaatcaagcaaacagtgagaatgaaagtgttccaaaggaaggaaagaatacatttgagggcagggaagactgctgaagatttgcagaactgaaagtctggttgtttgcctgaacataagtggaagctcctaaagggtttcaagtagggcattaaaaccatccattttatgattttaaaaaatattattctgacaattatgtgaggaagagattagaacagaacaagaatggaagtggtaagaatcattaggagactagtccaggagtccaggcatgtgattgagactaactggtggaagcacagatggagaaaggtagaagaattaaaaacatatcttatattttgatgtaagcaaaattttgaatgcaagcaaaataaattgatgagtggaaaaaaggagacatactagtcttctaagttgagcaaatgatgagatggtggttttctttggatcctttctgggaaagtttgttacaaatatacctaagtaatattaggtatattggttaacgaggggagcttaagtccagggaaaagtcaagaggaaagttgggacatgatagatttagagatctgagtaaaatttaaagcagactatacactatttcccagatgtcttaacttgcttgtctaaatgtttaatatttcatggtttcattcattaattttacctagactttgaattgcatctcaagtgctcatgaaggaaaagaatggtgtggtccatttgcataatctcttcttaccataaatattcataaattgtgtgtgtgcttctctcttagtgcttaccttattctactgttaatctataagatctttaaaggtataaatgtataaagagccaagacttactcttcttggtatccacaatagcagtagaggcccagtaaacatttgttaaatgtattataactaagttaaatttatgtctcaaaagagaaaaaatattctaaccctttttttctgaataagaaactatgtattttgtttaaaaaaaagtacagagataaggttccatgaagacaagtggtacatattacttggaatctttcccaaatgtctccagtgctttggcattatctcaattcccatatctgctttaacaaagccaatctctcttcggaaatatccatccactaatagattggtcagcaaacaatccaagctgtgagccaaagtcagcccactatgaggccaactctgtttgcacccattctttatagcttttgcactacagtggcaaagttaagtagttgcaacagagactgtataacctgtaaagccaaaaacctcactgtctggacttttatagttccagactctcacactagttgaatactttgaaaatcttcaggttctttctgggaagtttggtaagactatctctaagcagtattagataattggaatcttaccatttagcacactttcatacaaaaagtgacaggtaatggttgggatcagaacagaacaacataaagagggaatggaatacagaataagaaaacttgcagggtaggagttcccagccatcccattactgggtatatacccaaaggattataaaacatgctgctataaagacacatgcacacgtatgtttattgcagcactattcacaatagcaaagacttggaaccaacccaaatgtccaacaatgatagactggattaagaaagtgtggcacatatacaccaaggaatactatgcagccataaaaaatgatgagttcatgtcctttgtagggacatggctgaagctggaaaccatcattctcagcaaactgtcgcaaggacaaaaaaccaaacgccgcatgttctcactcataggtgggaattgaacaatgagaacacatggacacaggaaggggaacatcacacaccagggcctgttgtggggtggggggaggggggagggatagcattaggagatatacctataaatgacgagttaatgggtacagcacaccaacatggcacatgtatacatatgcaactaacctgcacgttgtgcacatgtaccctaaaacttaaagtataattaaaaaaaaaaaaaacataacgctaagaagccttaaaaaaaaaaaagaatcaataacataattcaaaacagagttgctcagatcaatacaacctagtggagtcattaaatttgtttttgggttcctacttccctactccactgttttctttgaggccatctccccaattcttcccccaccccattttaaagagctgttttcatgttcttaaaggctcatttcaaatgctatctgcctgtgaagccctttttaatttatccactcaacaaaactaggtatgataacccatacttggattcctagagcattttgtttgtggaatttactgtgtaatgcttatttattcttccaagtagattataaactctttgaagagaggtattgcccctagcattgaagtagtttaactgaaattaatttatataagatatgaatccaccacaattgcctgacaagaatttagaatatgtgtatgttgagagactgaatatacaaatggacaatgactgaaccacatataacaacagacccacaacatcttcagcaaccagcccaggaatagcctttaacttgaaacagcctctgttttcattttcactgcagccgtctgtcttctactgaaaccacgtggctggtttgattctgctattgaatcttagtagaactactaggcttaggattgacaggcacaggtttcaaaacagtgtgccttgaagaccaactaggaactttagcagagcaagggaagtcaaaatttaccagttgttgtaccacagcaaggtacaatccaagaataatggtttaaacctgcccctgggctctccctcatttcagcatacttacttctttgtcaacactatggatttagacttcccttttgctcaagaacactcatcctgtcatgcacggccttgctcagatttgtcatatctgacactttgatttaatgtctgactatggctcaactctgactttgtttcatgtcatgaatgagattttagtgctgctctaaagtccttctgttactaaccgggactcaaacccagagatcagatatgcctccccagtctcagcatgacctgtctttgtgatccagtcttcacatccatattctgaagactgagacaaggcaaggaccagcaggcattgagttaacaaaagcagagcaggcatatacactccggatcaaagaatcaaagttggagagaacagcaaacagcagaattcaaatggccaggaaaatacagaagaagctgccctgtacccataaaagtagaataagctgctgattcatttggggcctttgctgtctcagtttcacataattacatcctcctgcatcaatccaatggcccatcagggaaaaggtgttgtaacttactaaaataagagaattgttcaaggtccctgtgagaagctaactggattgtgaaacataaatcagggttctattgtaataatagataaacaatctcaaaattatttcagaagcaacatgtcacatggggaagccatcactactgtcatgtttgaggtgtgtataccctatcaatcattttaatgacattttacctctgcatggataggtaaagcatgattagcctgctgagttcagtagcagaaccagcctaggggaaggaaaaatgtcaaaaagtagagttaccttgatagagtcatcttaaataacaggccaagaatgccagtattctcattttcccacatctttatttatttggttttaggctttatcaaacaatgtatatgtgggaggtatgggtggttcaggagtacatggggtgcttaacctctttacccttgaacaattgaaaatcatcaacataatatcaaaatacagatacaatatggagatattttaaaatagtatttactctgttgatatgtagcttctaaatccagccagaggctatcataataaacaagtaacacattctatcacctttaggagccataagtctgaaaatatatagggaaacctacaaacagtaaataatacaagttcatatgcttccagtagtagaaagactgaatgccttaggaaaatgatagtgcaatgtgtgtgttgatatataagctaggttcctataataatttatccaaagtgaactcattgattgagaggacttcaagccataccaaggaaatacagagtttttaaaagaacacaatttttgattaagccagttatacttggattatgctcaagatgcagaatatgctttctttggtgggtagtatgtgacttgaacagtatgggagatcgtcattaccacacatcatcctttctgctgctcttgacaaaaggtttaaagttttacattccctattaagtcatttgtaccttcaagagggttctactaaatatatagacatatgtacaactacttaactttgccactgtagtgtaaaagctataaagaacgggtgcaaacagagttggcctcatagttggctgactttggctcacagcttggattgtttgctgacccatctattagtggatggatatttccgaagagagattggctttgttaaagaagatatgggaattgagataatgccaattatctcaattatctcaattgagataatgcctaatttataatatcgttttgaggactgatcctaaaaaataaaagtagaaatgtaagaaaacaaaacaaaataaaccaaaaactttatgataaaaatatattaattagatttttaaaataataatgaaaattggagcaataaaatgttgttttcagaagttagtttttaaattatgttcacataatgaactcttgtgaatccattaaagtatttttgaagaccatttaatcacaagataaaacccttcatataaacttaaatggaaaaggaatattcaaaaataatatgcaggatgatcacaacgtatgaagtatatatgttttatatcctagtgtgtgtagtaaaagagctgaaagcaatgacacataaatgattatcttgctgcagagagattatagataatataattttcttcattattttatggatattccaatttttataataagcatacattactttcatattttaaaagaatagtaattacacttaaataatacttaaatgagaatatatatatatattctttcaccccaggaagggattatgcctctagctgttattaattaacactttagaaactagctaagcatagggacaggaggatggcataaagaaagtgaagtgaatgtatggaggattcaattcaattaaaaaaatagtccgtcacaagtttataatgttttgccttttataaagtgctttcacatactttattccatgaagactgtctcaactttctagtgcacacacacatccacacaggcagacacaaaagatattattagtcattttaagtgcctagaaggacacatctaccctattgcccccaaactgagctgttataaccaggtaaatagctttcagtgaaaagtaacatccataaaagacaatcaatggtggcatattattcttgttcactctgctgtctttggttgctacatgtctccttggctctctattagagaccaagcttgcccgcttggaatgccaagcagtatccacatggctgaaggtaacaccttccttgccttgctttcaaagtcccacccatagctgaatacatctcccttatcttgctttccctttaatgaaagagcaacgttattacatgcttggattcaccagtgaaggacctggtccatgttgaatgagtgttttccatgcctacacataaacaggtcagaaaagtctagatctggatgtatagcttactatatcatcacactagcaaagcaccagcttctgatttccttttcttggctacatgctggaggcctggtcctgggccaacgacagctgtgcatcaattatcacaaagagagcaagaccttggggaaagcctgatgatttaacgagtgctcagctgggactttttcacttgatgtgtatcttagtactgcatagcaactcccttttagttcaaaacaatacatctcctttagtttatcgggtgattggcgtaattatgaagaagaacaaagatcaaatactgtgtccagaagcagagggactagaccacatggtaaggcagcagctagggagaatgatggaaaagtatcccctgcttctgaatagcaatccttctaaaaaacaccaatgaataaataaaaatcaggataggtgacataccttgttttaaagagtaaggaatcaccgtcgagagtggtaaaataacttgccctaatctacacacttgaagagatataactactacttaaatagtttgatactgagttctaagcttatttaagtcacctccgttcagcaaaactgttgtatatcatctattaaacgtccactgtgaacaagactctgtgtgtgtgcacatgcatgtgtgtgggggagagtagatgcacagtaataaaaaaaagagctcttttttttgtgtcttataatgatatacataaaacgtaataaacattacttactctggtttgaatgtgtccacgcacaattcatatattgaaatcaaatcaccagtatgttcctatcaggaggtgggactgttgggagataattaggtcatgagggcagagcactcatacatgggaatagtgcccttataaaagaggccgcagaaatctgccttgccccttccatcatgtgaggattcagagagaagttgccatctgtgtaccaggaaacaggctctcaccagatatcacatgtgccagcagtttgatcttaaacttcccagcctccagaactgtgagaaataaattattgttgttgatgagccccataattaatggttttttgttatagcagcccaaggacactaagacattgtataagtaagacaaaataaaatatgcaaacatattttatcattgtaatgcatggcaaaaatctgaactataatcaaatatacaatataccgtaagaaattggcctactctacaaatgaaacttagaaatgttttccctggacagtttaaatttgtggattaccacttcaaactcactcttgccattatccccagtgcacccgtcccactatcatttggtactgtcttgaggagaccttgaatctgagtccttcatagctgctgcctgttctttaaatgttaggtctacatgtcttgcatattattaggttgatgcaaaggtaattgcaatttttgctgtgaaaagtaatatgaatgcacttttaatggcaaacatcgcagataaatttgcaccaactaataacatggtccgctagactaaggccactataaagtcacggtctccaaattcagtctctaagtaatcccaggcaagatctttgactccttattcatcgcttgctactctttgtgggaccagctatttctaaaccatacagtcttctccaatctccatcccaccacctcctcagtcaccctcacttgatctcgattctatacattgacttcacaaacaaaagtcatcagactttctcacctttctgccaccttaaggctgggtctccacctggatccatcaggtgctctcttcctttactgtcacttagagctatcttctcttacgtaaaagtcaccactctccctctctgaggaatcatattccctccaccctcactttctcactctatttttaacatcagctttattaaaatataatccatagaccataaaacaaacctatttaaaagtttttaacctacaatttgatggtttttaatctattcacacagttgtacaaccatcactataatacatgttagaaaattttcattccccaccctccaaaaactgtatctattaacagttactcttcattacctcaaccccctcatccccagccccagccctaggtaccattaatttgctttccatctctgtaggtctgtctgctttggacatttcatatcaatggaatcatatggtatgtggaggcctcactctattaactttcctctgctcctcttttgtttttaatatctcctcctccacttgttctttcccatcagcattatgcatgttcaaatcctgcccatttttaaaaccaaaccaaacaaaacataattgtgcattagcatatcccatcccactccagcttctgcactgtctgtttccttcccaggcaagctttttaaaagaattgtttttggctctccatattctcactacccactctcctcaaaccatttccaactgcaccctgtcaaggtgagtaacaacccccttcttgctaaattcaatagatcgttaacacctactcctctttcaactctcagattaaacatcactttctctgtgaagtcttcttcagccccttacatctaggtcagggtttccccacttcagcactattaacatttgggaatgaataactctttgatgtggaggaggctgtcctgcaacctccaccggctagatgcaagtaacatccctacccccacccccagttgtaacaatcaaacatgcctccatgtattgtcaggtgtccctgggaggacaaaatcacccctgattgagaactactgatccagacatgtgtttttctttgtgtattcatgtcatgcttgatttctcttttgcagcattgattacattgaattgtagttgtttgtgggttcctccctaacccaaactagaccaagattcatatatcaggagcaatggttatctggtttatctcaatgtcctggcacactgcatggcacataataattaaacaatgtatatttgttgaatgaataaatacagtgcctttttgtcttgtgtatcagtaagaaatgagaacctcctgaaaacttattttttttgtccatagtttttttgtgtttgtggctgttttggtttctgtttgcttttgctgtgattacaccttgttattgagtttgtgtagggtcattgctaaaaatcataacatccaaatcaaaagattacaagtagaaagcagagagttaggaaagtatgaaaagattgatcttgtctgccaccctgttatttgtcattgtcttcttggttcagctttttagtcacagcatatttgtacaaatgctttatattattggacttcaaaacacctaagaaggctgggcgtggtggctcacacctgtaatcccagcactttgggaggctgaggtgggcagatcatgaggtcaggagatcaagaccatcctggctaacacggtgaaaccctgtctctgctaaaataaataaattaaataaaataagccaggcatggtggctggctcctgtagtcccagctactcaggaggctgaggcaggagaatcacttgaacgcgggaggtggagattgctgagccgagatcacgccactgtactccagcctgagcaatggcgtgagactccatctcaaaacaaacaaacaaacaaacaaaaaacaaacaaaaaaacaccgaagaaactagcatttgttggtctcatttttagattctgtccatagtctcagttttgtgccaagtcctctttgatattgattctgtatttcccagagggaaatagctcatagagtcactagaatcacacactcttggaactggctaattgcaccatatttttacagattaaacaattgatcctcagggatataagatgacatgctaaaatttcagtaataatctctaaagaactaaactagaatgcatgtttcataatttgtcaataaacaacactagattatgttttaaaaggtctcatttgttgactatctactatgtgctagactctgttcccaaaacctcacaacaaccttataattttctttataactttacaaatgtaacaacatgaaatctatctggcagggccaggtgtccctgactccaaagccgtcacccctctattcctctggactgcctcttctagacactactattaaagatcatttgctcagttccaccacatgtagcacaatttgtgatatatagtaggtacttgatatctaataaataataaataatttaatgttattccaaacgagctcttaggtttctcttaatggtgataaaaggggataataatcaacagataaacagaaagggcagtggtgggattgaaaggggaaaaactggaaaagagggaggatagattcataagagaaattaggtaatgtcctgaatgatgctgagatgaaggctaatatatcaatatcctagccatgtagctcattttttaattgagttgggatagctttagaatgcaggatttgggtaaaatacacaatgaagtgaaagataaccatggcccaggttactttatgagatcacattttattgggcttgaacatctacttagctactccaggaaataactctagtaagacaaccaagtatgctgactacaacatccccaaattaaactgtattgttttaaaaataagctttattgcaatgaaaaatgtgtagctattattttttatttttattttttttgagatggtgtctcgctctgtcgcccaggctggagtacagtggcatgatctcggctcactgcaagctccacctcccgggttcatgccattctcctgcctcagcctcccaagtagctgggactacaggtgcctgccaccatgcccagctaatattttgtattttcattagagacgggtttcactgtgttagccaggatggtctcaatctcctgacctcatgatccgcccgcctcggcctcccaaagtgcagggattacaggtgtgagccactgcgctcggccacaacatatatattctaaagtccccaaattacctaaaactataactcctcactgtctatttttttttttttttttggttggagaaaacagaaatcactgtttacatgcatccaaatggcatgattcttctgccctcctagtgtctcacacagtgtgtgtttcttccctgctcccctggtgtgactcctactatgctggttgttagctgtgttagtgccactgtttcttgaactggtctttttattttttattttttaatttgaccataaatagcaacagctttttttctgggctggaagaatcagggaactttggaaggtgtttttccaatctaagtagaggctatatctcctttagcagaatataactaaaataacagatctgatgaaatttttattctcttgaaagttcttatattttataccttaacaatctcttcatagccagtaatccactctcatctgggcttaattctacctttggctacagaagcaccgttgtacccactcatatacaaaacatgtaacaactgatcacactcaggtactgactaaccaggagaccactggccataaacaactggcacagccatacccaagtttgactatcagcccttcatgaaaggtgagcaagggccctgctctagcctgatgccttttccaagtgatgaggtatcaattcccctaggaagtattccttatttccaagtcacttccactatcccagaatttattgtttcaatgcttttgaataagaatgtaatcaatttagattctaaactataaagacctcacaccactatctcctatcacagatgaagctgcaccttcagtttcagaaagatgtaacttcaggatcttctttgtctttactcgtgagacacacgagtcatctccagctaaccaaggttacaaatgcataacgccagagaccagtccaatgcattaaaaaaaccaattacatgcttatagcgagtagactcacccactgaaagtagagttctattatacctggcaaactcctatgagaggagctgaacagaaagaggacctttccatctttgtttacaaaggcaggtcagtggaaaggcaagttgacttgcctgcctatgtttacttgtgtgctgtttggattgccttaattacccaagtatcttgttttcagagcaatcaccaagaaatttatctaaggttgattgttgcttccagtcatttttacatttaaaagaactattccaaatcaactcaagcatccatgggcttatataaaagagtggagcttaaagtataatatgtattaaccttgaataactactaagtgcatacagcataatagatacctctttgggtaagtttaattattgagagatattatgatacagtcattaagacatgaacttatgaatcagagatatctggaatcaactcttggctttgtcagttactacattatgaccttggataacttacttgccctctcaaagcctccgtttcctacgttgttaaatggagactattaatagtagtagtctgcttcagaaatttgttgtgaggttcaataagacatgggcaaagtatctgatgtaagcactctgtattaatctcttctctcattgccacagagaaataccagagactgggtaatttataaagaaaataggtttaactggatcacagttccacaggctgcacaggaagcatggcagcatctgcttctgtggaggcctcaggaaacttccaatcatggcagaaggcaaacagggagcaagcacctcacatggctggagcaagaggaagagagagagggggaaggtgctacccacttttaaacaaccaactttcacgagaactcagtcactatcatgagaacagcacccgggggaaatgcacacccacaatccagtcacctcccaccaggcctcacctccaacactggggattacaattgaacatgagttctgggtggagagacagatccaatcatatcacattcaaaatggtagctattcttattatccatgactattacaacaacatactgaggttaggtattagacccgttttacagatgaggaaacaaagactcatggaggctaaataattcccaaaggctgttttctttgtagtatatcctggaataaataatgtggccaccatcattgtgtggtttacaaactgcctctagatacggttcccaaagaggagccaaaacattttgtataactaaaatttattcctctaatcctcacaagcatacacaaagcagccagcttgaaggacaatattcatatagatgcctaagttctgcaaagtgtatttttaaaattcacattacttcgtggataaaattcctattgtttttgttctcttgcccactcttcctgagttgcctgacttttctttcagaatcaactgacaagatgttctggaaacaagatgtttcttagcaacattttgtttatctagataaaaacataacctttactgccacatactagagcagagagatcctcagcatttaaatgatatatacttattgaagctcttggtttttaatttctatatggtcctatgtgtttttctttattttgggagggaagtgtccttcactttaacaataattcttcttcagggtcatagctaactgtacagcatctcctcctgggtctccacaactatttctatgtatacatgtaagaacacaagctcatgaggttacaagtgcatacatcttaaaagaaacacatgtcactttgggaggccgaggcaggaagatcacaaggtgaggagatcaagaccattctggctaacacggtgaagcctcgtctctactagaaatacaaaaaattagctgggcgtggtggcgggggcctgcagtcccagctacttgggaggctgaggcaggagaatggtgtgaacccgggaggcagagcttgcagtgagccaagatcacgccactgaactccagcctgggtgacagagcgagactctgtctcaaaaaaaaagaagcacatgtatgatgagttttctctgcctctgttggtttgcgtcagttccccattctgcttctctggcatatacatcttttcaaagtaatcatttatgcaactttgattatttagaggatttgctccttcccaaaagaaaaatcactgaactaagaaaactgtttagaaatatctgacaaaaagaccaataagtcttgagaataagtagccttctctgtatctccattatggtaatgttggctgtagatgatcaaatccctaagagatgacagtttcctgacccaaaggaagttacttgcaagtgagaattatgaccttggatgacttacttgccttctcaaagcctccgtttcctatattattaaatggagactactaatagaccctgcttcacagagttgttttgaggttcaatgagacatgtgcaaggtgcctgatgtaaacactctgtattaatccgttctctcactgctatagagaaatacctgagactgggtaatttataaagaaaataggtttaaatggatcacggttccacaggctgtacaggaagcatggcagcatctgcttctatggaggcctcaggaaacttataattatggtggaaggcaaaggggaagcaagcacctcatgtggctggagtaggagagagagaggaggagggtgctacacatttttaaaaaaaacaggtctcatgataactcagtcattatcatgagagcagctccccgagggaaatgcacccccatgatccaatcaccacccacatgcatgcctcacctggggtaagggatagcctcaagcctcagaagaaactgcagtgtaaccacatggatatttgaggggattcatggaatttaagttcccaaaaaattttcttaggcttctgtattagggttctccagagaaaaagaaacaacagaatacacacacacacacacacacacacacacacacacggagagggagagaaagagagaatgtattttaaggaataaattatgcaattatggggactatcaagtccaaaatctgcagattaggccagtaggctggggacacaggaaaaagttaatgtttcagtcttgagtctgaaggcaatcaggaggcaaaattccttcttcagaggatctcagtcttttctcttaaggcctttgactgattggataaggcccacccacatcatagatggtaaccttctttactgaaaatgttaggtgttaatcacatctaaaaataccttacagcatctaggctggtgtttggccaaacaactgggccccgtagcttagccaagtgaatgcaaacattaaagatcacagcttcctagtcagccctgatcctcttctctcagggtcatctgggggcaagcacaaccccaaatagaagactaagcacctatctgggatattctgggtgactaaaatcacctgaggcatcaaccacacagtttatactatggaacatgttatcagattataaatgaacttctttgttttgcaattacatttttaaaatttatttatattttttattattttattttatttttccattagttactgggttataggtggtatttggttacatgagtaagttctttagtggtgatttgtgagatcctggtgcacccatcacctgagcagtatacactgcaccatatatgttgtcttttatcactcaccccctcccgctcttccccacaagtccccaaagtccattgtatcattcttacccttttcatcctcatagcttagctcccacatatcagtgagaacatacaatgtttggttttccattcctaagttacttcacttagaatagtagtctccaatctcatccaagtcatgcaattacatttttttattttgagataattatcattttacacatagttgtaagaaataatacagagaaatcctgtgtactctttactccatatcccccaatagtaacatcttgcaaaaccataatacaatataaaaaccaagatattgacattgataaagtcaagatacagtacatttccatcacctgcaaagatcactcatgttttcctcttaatgccacacccacttccttcctacccccaactcctactgaaaccctagcaaacactaatctgttctctattttcacaattttgttatttcaggatgttatataaatggaattatatgttacataacaattttttattaaagttttttattcagcatacttctctaaagatttatctaaattgtttcttatattgattgttcttttattgatgagtaatgttccatggtatagttgtaccacagcttgtttaaccattcacaagttgaaggatatctgaattgtttccagttcttgctataacaaataaaactgatataaacatttgtgtacaggttttgtgtgaagataaatttttaattctctgggacaaatgccaagaagtgtaattgttgggccatatggtggctgcatatttagcttgctaaggaactgttttccagaatgactataccattttacattccctctaggaatgtgtgagaaatccagtttttctgcatccttgacagcatttaatgttgttactagtctttaagcattctgatagggggtacagtgatatcgtgttcatgtggttttaatttacactgccctaatgatgaatgatgttgaaaatcttttctagtgcagaattgatacctgtatattttcttttttgaaatgtctcctcaaatcttttgcatatcttttaatttgattgtttatttttttcctgttgagttttgagagttctttatttattgtagatactagtcctttgttggatacataaattgcatatattttatcccagtctgtgccttctcttttgtcttcttaacagggtcattctcaaagcaaacatttgttgttgttatgaagtttaggtcaaggggttttgttctgttctgcttcgttttgtttttcttatggatgttcagttgctctagtaccatttaataaaaaaaagcaatcttacctcctctattaaattaccttttctcctttgtcaaaaatcagttggatacatttttctatggatctatttccggattctctattctgttccattgatcaatgtgtgtgtctctctctatcaataccagtcttgattactgcagctacataataagtcttgaatcaggtagaggcaattcttctctctttataatctttcaaaattattgtagctactctagttcctttgcatttccatacaaattttagaataatcttgagtgcatgaataaaaatcttgctgagattttgatagaaattgcactaaatctgtatatcaatttggagataattcataactacattgtattgagctttatcttccacaaacacagtttgtctttccatttattgagatctttgatttctctcatcagcatattttagattttggcatacaactattgtaaaagttttgttagatctacacctgaacttaaaaaaaaaaaaacagaatggaataaaaccttctttattgaggagataccactttttattcattcttgtcactatgcgtctacatattcagggtttattagttggacttctgttttaaaaatcatctatttgctgcttagaaacaactttctaacagactatgtcaaaaattaccaatatttatctgactgacaaaatcaagaaaacccatagctgcaaactaactgggtttggcaaggctcatctatttatttctgttgtttctcataatagtgtgtcttctagctgcattagtaggactcaaagtcttgtaatatgtactttttttgagcttaacccttatatgcaaagccagatctcagtatttttaaggttcccgatgatgtcaccatttgctagcatggcattctaataaatagtaggggtttggatgcagagcttttgacactaaaagtatacatgatggtgaaaaaagagactctggacatcaggactgctactggaattaatttgtagttcgcagtgtgaactatcgacttgtgatggccttgcagcagtaaaaatatttcctagcaacgtgtagttaatgtggtttgttttcaaatgaaagccacacattacaaatcacttctttttctctgattaattgcagaattttattctaggttctgagttgcaatgttcctcttggcacaatctcctgaagtttcatgtgaaggaagaatgcaattcgtaagactgaggatgaatgctggtttcttgtgccatctaaaacaagcaagcctgtaaaacccactgtaagacagttccaccatataagcctcagtttcccagcgtgagcgaataaaggcatattgagtaaactgaatcattgaatctgatccgtgaaacttatcattgaagtagtgtagaaaggtaagaagactgaagtcagaattctttgattcatagctctctagccaaagtgatcaacttctccaagtttgtccaggacttttctgatttaaaaaataaaagtctcatgtctcaggaaaccttttagccttagttttaaaattgagattcccatgtcccaatacccacatcagtcccaggaaaataaggatgtttgactaccgtaccttcagctctcggtcttactaactttgggattttaagtgaaacatatcacttatctgagtctacctcctcagatgtagaaggtagggagtaattactttctcccctcacagggtcatcgaaggaacaggtaggataatgttaatggaatactttgtaaacagttgagcactatatggatatacaggtttggtaccatcataattcacggctgtctcatgctaacaatgaatatatttgtcttatgctttattcgattggactctctggaaaagaaacagtcataaaattatttttaaaactttgcccaatagctcatttcttttcaaccagaacaatattttctgccatactctacagaacccattagctaagcacgaagtatcatatacccccaaattactgctaaatgctgtttaccctctaatcccttaattctattcatctgacatcactttatggatctctcgcaaatagcacagttcaagtgtacaagcatagaggatggatttgaataattgcatgtttatgttcaagaatataataaaatatttgcagatccaattctcttttccaagagtaatacaccgttctatgtaaaggcgaagggttggttgcaaattgccttcagcattttaatgatagtatttaggaaagtaataacaaggctttggttagaggtcctttgcaagtttctggaatatagatagctgagtgtagcataccagcagattttagcaaattcatgaggcttcaaagttgatatctgaaacactgtcaagtgccagatcttttgtttgactctgttagtaaatgtaacagatggtttgcaaacatgtttgggatctgaaggctgactgattgtgtcagtctgatagaaatagaaggcagtcatttaccacatcagaatgtgagaaaaggaaagcctcgaaattaaacccttaaaagagagggactttctcactgagtctaacaagagagaaccttgagtttaaaaggtatgttacctccactcacattttacatgtttccttttattttatgccagtatggaatattagaataagatcctgtcatgttccaaaaaacaaataaaaaccatatgtgtctctttgatgcaatagtgaaatcaccatcatagatagatttccgttgccatagggatgattatgctctcacagaatccagtaaggcaacttcgtctctgtgaatccagctaaatgagagacaaaattctgtctctttcttttccagtctgcaaacaagaatattgttaacctcgcagagacagaaagttaatagctgggctcctctatttgtctgacttgcacctctacccttctcatctccgtgttaaagcataatgtaggtcagccaagaccaaagaaagttgtggctgttacagaaaatgcatgtgataacatatatagctttattctgggaccagtttgaggcagacacagggcaagaaaatttctgcagtttcagcctctgaaacacaggtgaaatggcaggcttattggggatttccatctgggcaggtgcacagaagctcaagtcactccaagaagactgctggtaaatgattggtattggatatttgattggacttcccaaaatgagaagcagacttcaaaatggagaattatggaatagctcttgaagcaaactatactctgtttttttccatccacgtttaattacgggccttccctgtaccaggcactgtgttggccacagaagatatgattaaacaaactgacagggtatcggctctgatggggcttacacccaacagagagaaacagacaccagaggagggctctctgagttggttacatttgagctaagctttgctacatccaatgaggagtgccattttataaatgttcctacagtaatttcacactttcgtttcaccatttttctctatcatgaacattcccaacaggagaaatgaagatgcacagtggctacaacgtacctagttattgaatactcagagaagcaagggaaaaatctaatggaaagggtcagctgcagtttcacattccagctcaatcactagttgaacaattaacttacccgagcttgggtttcatcagcagtgcattgctgacctgacaccctatcaacccccaatactatagtatgtatttcttataagtaaagatattgtccaacatgaccccaatacagccatcaaaataggacattaggattgatatatttatctgatcctcagactccaagttttgccaaatgtcctaatggtatcctttacagcaatagtcctgtttaaaagcatctgtctcttttagttgtcatatcactttagcaacctttcatttggaggagtgcctccatctgcccttgacattctttaatagatgagtcagttattttgtagtatgtctgtcaatctgggcttttctgttttctcataacttgatgtggacaccctcttcaagctgctcagtctctgacataacagacttggctatcctcccacatgcactctctcctcaccctgcttggtgaaaagttcaaaggaccgccttctttacctgttttcactctgatcccccatgccatgttgcccactgaagggatgcccttctcactctatcgaggttctaacacctatgacaggcagttctcctgtatagatacccagggtactctcaattctgggccactgcactcctctatattcacaattaatgtctaccatattcagctccacctattgactttagaatacaactattcaggggcttggcacagtggctcatggctgtactcccagcacttttgggaggccaaggcaggtggatcacctgaggttaggagtttgaaaccagcctggccaacatggtgaaaccccatctctactaaaaacacaaaattagctgggtgtggtggcacaggcctgtagtaccacctactcaggagtctgtgatgggagaattgcctaaacctgggaggcggacactgcagtgagctgagaatgcgccactgtactccaacccaggtgacagaataaggctccatctcaaaaaaaataaaataaaatacaattattcaggaagaaaggaaaggagaaaaaatcttcagaaaagcagaagagaaataacatgattaccattttgaatattattccagaatgtttcaaagtctaatcagagttcttcatattatttgcaaataacaccaattatcctaggacatactgtccagaagccagtgaaatcaaaacaaccgccaccatactttgcctcccctcataaggaaggccatattaaacactcctctgcacagggccaaagccacctacttgggatatgtaagcctcttagcagacaattattctgaatttgccccagctgagcttaagttccctgcttcttttcccatccccactgctgacttctgtagatgaactcaaaattctctttatccacaggtaaacttatgcttttatttttagcgtgtctctggtcgtgtttatttacctaaataaacatccatcccatttcaacgtatatacgatagaactcgatgactgatgcatgtaaacacttctgatacatgttatgtagggtctgctgacaatattgcagtcttttactttgctggctattattatacatgaaactagatctcactggcccatcacagagacaacaagcctttacctcatcacacacacacaaacatatacgcacgcgcacacacacacacacacacacacacacacacacattctaaggaccatagtagctgactgtggattctgcataactcatttattcacccacctgtactttcaacacacatttttgagtgtggttattatgaaattcagggataggcactgggtttgaatacatgaattctgaactaatctccaggttagtgtctggtgaggttcagtggcggagctaaatatgtacacaaataattacaatctattgctttgctgattgctttttctcttttgacttgtctatccagtcaagtccccttagttgacaatgaatggggccaaagaaatatgtacttggccgggtgcagtggcttgtgcctgtaatcctagcactttgggaggccgaggtgggtggattgcttgagcctataagttcgagaccagcatgggagacatggtgagaccccatctctactaaaaatacagaaactgaggtgggaggatcacctgagcctgggaaaattgaggctgcagtgagtcatgatcacaccactgcactccagtctaagcagcagagtgacaccctatctcgaaagaaaaaaaaaaagagaaagaaatctatatactctttattttatttttaatattccatatatagaaaagttcataaaacttaaatgccagtttaatgaataatgataaacactgatgttcccattactgagctaaagaaagagaatactgcccatcttcagacttcccagtcctgatccccacagaagtagccattatcgtgacatgctgatggatcatttccttactttcttcagaggtttatcaccaaagtatgcacctctaaaaagtttagtcgtttgcctttttcaagcttttgcattagtgaaatcatagtgaatgcattctttttttcttgtttctttctttcaacattatttgtatgatttatctatgttgtttgtaactgtattgtgttcattttaatgacataaaatattttattgtatgaatatattttgatatagttatatattcccctcttaaagaaccattgaattttttcaaatcaggggctattatgaatagtataactatagacaatcttttgcttacatcctgatgcccaggaatataaatgtttctatatctgagtgtaattactagatatttgatcatatatattcaacaatatcagataacatttatcttaaaaaataattgtattaatttatactaccactggaagtattaaaaattcccattattccatattctcgtcaacattgggattatcaggcttttaaatttttgtgaatttgatagatgacaggtgtgtaatgacactttactgtaatttctatttacattctcttgattatttaagaaatcaaacactaatccatgtactctttcaaattttgaccattaagtctgaaaagattgctttttatctaatgatgaataagcaaacattcagcatcaggcttgtgaaaaaattaccatagaaggaaaatccctcattcttaacaaccagaggaagagaatattctttagtaagattggtattaaaacattttctcttaaataaaaaggtttcatcaagatttggccttcatcaaataggaagataaatctgtataaaatacatagtctaagtcataagagactacatttttaaagattgcaagaaaataaaacacacgagtataataaaaagatgtcttatgaaggcatcaaggaaccgaaataggatttggaaaattacattggtggtgtttgtccataaagaaagaacagcagaaaatgtgacattgtatgtccctttctttcctctatgctttcccaggcacatgtatcataaatgttgactcatcctctactcctttgacttttcccagtgtgtacactcatggtaataaaccctgttttggttagtgctttacagagaattcctaactaagaacaaacaaaaaactcctgcatattattattctccatcagtcaacttccaattatacttgttccaatttctttaccagagcctctcttagcaaccatctgttacggctcattctattatgatgtctgccattctccctctgtccactggatcattaaacttagatctatttccatattttttacttaatattttccaggaatctggtagccttaaccaagagctaaagtttcttgtgcattctctttaaaaaatattcttaatttttgtgggtacatagtaggtttatatatttttggggtacatgagacattttgatacagacatacaaagcattataatcacatcagggtaaatgggggattcatcatctcaaacatttatattttcttcgtgttacaaacaatccaattacactcttttagttgtttttaaatgtacaataaattattgttgactggaatcaccatgttgtgctatcaaatattagaacttattcattctatctaactatatttttgtacccattagccatccttatttcccctttccccccaacccctgccatcttgtgcattcttgattatgcttaatggttaaacagactctgtataacaaataagggctttctttaatctgtgttgcaatattcttggagtgcccagggctcagacataaaaccaatactaagtctatctctcaccagttatttgagacatttctgactttagaataaatgtcaaagtcttaatgtttgctcctcaaaaatacctactgtcctaaagtagtgttagtggctttgttctaattcagatcaagtctatagtttttatggatattttaagaacacgtacaagcttatatacatgcatgtacatctgtgtgtgttcatctccagactttcaacctaaggggttttgaacatattaatttgatttgtatttcaagaggtgaatgaagctctgaagtattttaatgttcttctctgtccttttattttctattcgaatatattctgagaagtgtcttcttatttaagtcagctgattagtccaaagggacagatcgatgctgtataaacgctaatgtgttgcttagagaacttcatttcaaaagcacaccattcaagttcatttatgcatgtattgtttatttgaatgttgtgaaaggccaaatcacatgaaactttaagaggacagtgtttccaatcatttggactttggcaagtgcaattttgttcagtttaccatagcttagtttagtgctggtttcagtttgggagaaagcactctgtatggggggaaaacagccaagacattgctgatgacattggcagtgtagccattttggcgggggatcctggtcccaatgtcccatttattaactgtgatagaagtgacaagttattcatcttttattcccctttttcctgttggtacagggggaaaaatagcctgaatgatccctgtggaactttgggaggatgctatatatacttcaatatgtatagtaacttatttgaataacatttatatccatagtgccaaagatggtctcaaaacgttacctaatctagctgatttcaggcaagagctattcaaagactaagaccattattttacccataatctgacatatctctggagaaagatactcaataaacattctgcaaaatcagctcaaatgatagttccttttcttaaagcttctttatatctaattcaaatctcttgcatttgtaattcatgtgtatttcttacatgctattcatggccaaaggaaaaaaaaatttaagttgtttttgatgttgataaactagctatatacaacataaattttgacgtggaaaaatttgttatgaacagtacataggcaaattacaagctgaggaataaaacatctgaaacttagagataaatgatatttttaacatataaagattgctcttataagtcagtttgaaaagaccaatagcccaatacataaatgggcagataatctaaacagaaagttaagaggaaagaaactatacattgttctgaaacatacagaaaaatgctcagtttcactcttcatgcaaataaaaagaatactgagataccactttttcagctttgagaatggcaaaaaataaaaaagagaaatttggcccttcacaagggccttttaacccagaaaatctgtttcttgggatcttacagatacaccagtacatgtataggatgatatatctacaaggttattaattgcaacactttttataataacaaattgtggggaaaagcaagagagatcagattgttactgtgtctgtgtagaaagaagtagacataggagactccattttgttatgtactaagaaaaattcttctgccttgagattctgttaatctataaccttacccccaaccccgtgctctctgaaacatgtgctgtgtcaactcagagttgaatggattaagggcggtgcaagatgtgctttgttaaacagatgcttgaaggcagcatgctccttaagagtcatcaccactccctaatctcaagtacccagggacacagaaactgcggaaggccgcagggacctctgcctaggaaagccaggtattgtccaaggtttctccccatgtgatagtctgaaatatggcctcgtgggaagggaaagacctgaccggcccccagcccgacacccgtaaagggtctgtgctgaggaggattagtaaaagaggaaggaatgcctcttgcagttgagacaagaggaaggcatctgtctcctgcctgtccctgggcaatggaatgtctcggtataaaacccgattgtatgctccatctactgagatagggaaaaaccgccttagggctggaggtgggacctgcgggcagcagtactgctttgtaaagcattgagatgtttatgtgtatgcatatctaaaagcacagcacttgattctttaccttgtctatgatgcaaagacctttgttcacctgtttgtctgctgaccctctccccacaattgtcttgtgaccctgacacatccccctctttgagaaacacccacaaatgatcaataaatactaagggaactcagaggctggcgggatcctccatatgctgaatgctggttccccgggtccccttatttctttctctatactttgtctctgtgtctttttctttcctaagtctctcgttccaccttacaagaaacacccacaggtgtggaggggcaacccacccctacaacgatttagaatatcttttttgtattatactttaagttttagggtacatgtgcacaacgtgcaggtttgttacacatgtatacatgtgccatgttggtgtgctgcacccattaactcttcatttaacattaggtgtatctcctaatgccatccctccccccaacccccaccccacaacaggacccggtgtgtgatgttccccttcctgtgtccatgtgttctcattgttcaattcccacctatgagtgagaacatgcggtgttcggctttttgtccttgcgatagtttgatgagaatgatacaattcacaatagcaaagacttggaaccaacccaaatgtccaacaatgatagactggattaagaaaatgtggcacatatacatcatggaatactatgcagccataaaaaattatgagttcatatcctttgtagggacacgaatgaagctagaatatcttaaaggcctttcagtataaagaaagaatgatttaaagaatgaggaagtatctggatagtgctatggaaagatgcctaaggtatattttaatagaatatagcacgtacacagcaatgtttgtaatatgctactacaatgagggttttaaaaaggtggactagatagacagacaaagacaatttctggaacaatgcatgagttgcagtaatactactgtcccttggaaggggaattgtatgagtcaggagacaaaatttatacatttcacttcaaacgttctgccatggtcaagtattatctactcaagataaaataatttgaatgcaaaaatttaaatctcttatcagtccatttgacttctatctttttttaacttctttgtgtattagtattaatttaacttgtctaatagtaagaagtagaaaagatatagaaaattattaagataagtacaccattattattaccctctgtatggaagtgtgacatacacttgtgtttttaatacaaggcagaattgcgataagtgttttaattgtgataactgttttaataaaactctaatctaaaaacagcattaagtttattgaagagaaattcacaacagggaatgagcaaaggctcatactagagatgaatatatttgtcttgccttgataaagacagaaagttgaggatggatagaaaagataaggcattttagaaggaatagaaggcacacagccttatttactcatctgcatcaacaaaagcaaacaacttagctgttgggacgacctgcactcgtaatgacattcaagtgacatttagttagctaagaattttgtctatttgcaataaactgttttgcaaatattccccaatgaattgacaaatgttgctattggtattgtcattattatttttattaactgaattgtccagttatttgtaatttgtacttattactatatagtaaaattttggagtcatatccaataggttggcaaccatgtgtggctggcagattatgactctgcacaagagaaccctgccaataagtgaatctaacacatgcaaatttgagggttgtgtttacctagaatgggcacctttttctaaaatactcaaagaaaccatatgatcaagtaatctccctgttttgcagggaagcaaagttttgtaacatgaaaatactttcacattaattggtcacttaattgtcccttagttccattcaaatattccacccttattctagtgtctattcccactaattcattccatgtcactctagaaagtcccttattggttgctgggtaatgcatatacaatatcaaagaatacccaaataaaatatatatgtcaaaatactggtttcattaaagaaatggaagtaatgaataactgctggagtaacctgcaaaatctttaataaataaaattctggaaaattagaccagataatggttcacaaagagaaattcaatgatagtttttgtaaaacaggcacttggaaaagaaataaaagtgaaataactaaagataaagaaatgccttagagaaaaactagtaaaaacaattgttgcagtattcataattctgttgtattatatatgaatttattgtaaaaaatatcacattttgctgtgatatatttttaaacaccgaaatataagcattttagcttagtctaataattgtaattaaatctattttcattaaatataagtttacatatattaatatttaccttttaggatatctcttagttgcattctccaaggtaaagttaccatttaatattttttcttcttctttttttttgctatgaaattgtatttggtcattaaagttccagcttaaaaggcctttttaatatttttcttcatcagtagatttttttgtaaaggtgattgtttattaaataaagcaatgcaataaactatgcctactatttgtaagttaatatataaagcaataatttattttggaaagataagataaattctttttcttttttttttttttttgagacaaagtctctctctgttgcccaggctggagtgctagagtgcagtggcgtgatcttggctcactgcaacctctgcctcatgggttcaaatgattctcttgcctcagcctcctgagtagctgggattacaggtacacgccaccacatgcggctaattttcatatttttagcagagacaggatttcaccatgttgatcaggctggtctcgaactcctggcctcatgatccacctgcctcggcctcccaaagtgctgggattaaggcatgagccattgtgcccagccgagaaaataaattctataagttctgttagatatattgctgatagctttataagtttacatatagcataaatgaatgacaatttgtcaatattacaaaaattttgaatttttgtcccagcaaaacagttctaagacatatgctaaaaaatttatgcaagttggaaagcatacatcatatcattacttataatacacaaatctgaatgatattcatgtctaacagtggagaattgcttaaactatggtatatccatacaatggactatcacgtagtggtatttgatactgacaaatgttgatgcagatgtacatttatagctaaaaaagattttcaggaattcatttttaaataaaataaaaattatatatataaatatcctatgagctcatttgagtttagataaccaaaccttccatgtgactgagctggagctcaacagagctaacttcattgacctatcattcattttaactatatagaaggatatgcccacaaaactttccattttgtgtaaaactataatatattatatgttttcaaaaagctagaaaaagttttgaatgttcataacacaaagaaatgataaatgcacataaacagaactaaagccaaaaaccacatgattatctcactagaggcagaaaaggctttcaataaaattcaataccccttcatgttagaaactctcaataaactaggtgttgaaggaaacatacctcaaaataataagagaaatgcaaatcaaaaccacaataagataccatctatgacaaacacatggccaacattatactaaatgggcaaaagctggaagcattcctcatgaaaaccatcacaagataaggatgccctctcaccactattcaacatagtattggaagttttagctagagcaatcagacaagggaaagaaagcgcattcaaacaggaaaagagaaagtcaatctatctctgtttgcagatgacatgatgctatatctaaaaaaaacccatagtctcaggccaaaatctcctccagctgataaacaacttcagcaaagttgcaggatatagaatcaatgccaaaaaagaatgaaatacctaggaatacagctaaccagggaggtgaaagatctctacaatgagaattataaaacactacccaaagaaatcagagatgacacaaacaaatggaaaaacatcccatgcttctggaagaatcaatgtcattaaaatggctatactgcccaaagcaatttacagattcatagctattcctatcaaactactaaagacattcttcacagaactagaacaaaaccattttaaatttatatggaaccaaaaaaagagcctgaagagccaaggcaatcctaagcaaaaagaacaaaactggaggcatcacattacccaatttcaaactatactacaagcctacagtaaccaaagcagcatggtaccagttaaaaaaaacaggcacatagaccaatggaacagaaccatctgatcttcaacaaacctaataaaaacaagcaatggggaaaagactccccattcaataaatggtgctgggataactggctagccatattcagaagattgaagcttgaccccttccttacaccatacacaaaaatcaactgaagatgaattaaagacttaaatgtaaaacctcaaactctaaaaaccctggaagtcagcctaggcaataccatcttggacacaggaacagtcaaagatttcactataaagacaccaaaagcaattgcaacaaaagcaaaaattgacaaatgggatccaattaaacttcagaccctttgcacgcaaaagaaaccatcaacagagtaaaaagaatacctacagaatgggagaaaatattcacaaactatgcatcccacaaaggtctaatatccagcacctataaggaatttaataaaatttacaagagaaaaacaaccccattaaaaagtgggcaaaagacatgaacagacacttcttaaaagaagacatacatgtggccaacaagcatatgaaaaaaaaaaaaaaaacctcaatatcacttatcattagagaaatgcaaatcaaaaccacaatgagataccttctcacaccagtcagaatggctattgtaaaaaaagtcaaaaaataacagatgcggctgggagcagtggctcacacctgtaatcccagcagtttgggaggccaaggctggcggatcacaaggtcaggagatgcagactatcctggctaatgtggtgaaaccccgtctctactaaaaatacaaaaaaattagccggacgtagggtcgcctgtattcccagctactctggaggctgaggcagggagaatggcgtgaacccaggaggcggagcttgcagtgagccgagattgcgccactgcactccagcctgggtgacagagtgagactctgtctccaaaaaaaaaaaaaaaggaaagaaagaaaaagaataacagatgctggtgaggttgtgaagaaaaaagaatgctgatacgctgttggaggcagtgtaaattagttcaatcattgtggaatgcactatggcaattcctcaaatacctaaaagcagaactagcactcaccccagcaatcccattactaggtacatacccagaagaatataaatgattctaccataaagacacatgctagtgaatgttcattgcagcactagtcacaatagcaaagacatgggaccaacctaacctccatcaatcacagactgggtaaagaaaatgtggtacatatacaccatggaatactatgaagccataaaaaagaacaagatcatgtcttttatgggaacatggatggagctggaggctattatcctttgcaaactaactcaggaacagaaaaccaaataccacatgttatcacttataagtgggagctaaatgataagaacttatgtgtacaaagagggaaacaacagacactgggctctacttggagggtgagaggagggagaggagcagaaaagataactattgggtactgagcttaatacctgggtgctgaaataacatgtacaacaaacccccgtgacacatgtttacctgtgtaacaaaccttcatatgtacccccaaacctaaaataaaagttaataaaaaagaaaaagaacaaaagttaagcatgatcatggctgaattttttaaaatgataaatgttcgaggtgagaaatattgtaagtgccctgatttgatcattatacattgtatacacatatcaaaataccactctgtgtccctcaaatatataaaattattgtgtatcaactaaaaacaaaagaaaaaaaatgctgaccatttgttcttgaggcttctgccatcctctttagcctcagttgttgttgatttatcgccttattttttttctcagctctgaactgcttatgttttcctaaacaggggttgccatttagctccttcttaaatttgattatgtccattcaatgcactctcaaaacctccactgtctgaaaaactttaaaaattttgttcagctagcacctccttcaagacagttttaaagattcccaaatatatcactcctccccacctccaaagaagattatactcccagaaaaatatgtaaaaataaatagtataaaattattaattttactttcctttataaagcctcagaaattaaatctgtaaatcatattgagataaaaccaagctcaatatcagaatcttcctccttcaaaatgtaaaggattcatctcacactcatttgctttaattgaactctttccatttgcattttctgcagatgtgtttttaatgtctactttttagatagattgacaagctaaatggcctcatcaactttctctggctttacagtggcaaactgcaatgaggaaaaacaagtgactaggaaaagaggtaaataagtatatggcaagctctttgaaagattcatttgttcactggaaaatcacaactgtctttagtggagggacacatgttttctctcctccacatgccaaataaatttttaggaagtctcaagtgaaaatattaattcccaagactgcattgatttttttctctcttcattccactcctccaattcctttctttattctgccagcaacattcttttccccaattctatgtctgactattaaaaccctaatcactgtatatgattctattgcaatgtaccttctctgtgaagttctccaggatcagccctactggtataattctcccttttatctgacttcctacagtactttcttagggtcaagagtatagtgtttatccttatttacactagaggtattattctagctatcttctgtttcttagtaacctgtaagctccaggaagcaaagaccatatcttttacatgtttattccccagaatgtctaaaacacggatttgcataatgtgtattcagtaaacagaatgaaggaatttgaaagagaaaatattatgaggaaagattaataaacactgaattcattattagaaaaaggagtcaaatagaacacagataatacatggctattttgagtcttataacccttttcatagcctgaagccttggacattgacttctttcccttaaaaaagtcatgaatctagaaaaacagacatataagaatagttagtggcagttactgacattgaccacagaataaacaagggcatcacaacactatcacctgtacaggtatcagagcagctgccagtcatgggcagcatccacttcaccacagccaacaccacctgagcatttacagtgtggtagacactctgctgaataaatctcaggtaatcctcacaatgacggctagagtgagatacccttaatcttcttgttgtacaaatgagaatgcttaagcctcaaagaggttaaataatttattctaggttacacaactaatgatgaaatagaagtccaatccagatggacctgacctcagaaatactgtaatggggccagctcactcctgtaattccagccctttgggaggccaaagtgggagaattgcttgagctcaggagtttgagaccagcctgggcaacaaagtgagaccttgtccctacaaaaaatttaaaaaaaaaataactggttgtggtgttgcacacctatagtgccggctacatgggaggctgaggcaggaggatcacttgcccctagacggtcaaggctgcagtgagctatgttcacatcactgcattctagccgggtgaaagatcaaaatctgtttcacaaaacaaacaaacaaaaagtcaaacaaacaaaaaatcaaacaaacaaaaaagaaatactgtaatgcctcagcatgcccgaaatttagagggataaaatataaatttttgttctttaatttaaaatatatacatttgtaaatctaaaatataattcatatgaaaatctcactctaaaactattatacaagaaataaatatcctaaagctcaactgacttcaaaatataattaccttttgattcctgcacttccttcccgcaaaccccacattctattggctttttttcatttctgcaatgatgagttggaaactagtaactattagcatattaatatcgccaactagacatttctatttctaccattgcagcctacaattgcattggattgttagagttgatcacacggttacttatacagggtttgtaattgtaacatttagagatgcttttggctgcaaataacagaaaacccaataccagggcttaaataaataggaacagaagcatcaacaacgtggagtttggaagtaagccgttctgtctgctgtttcagtggattgatgactttctagctgatatctctgtaataaccttggccaacttttgttacttgttgcctcaggacaccaagatagctaccctagttgccatgtgaaaactaggaagatagaagaagaagaagtgctttgccagttatatctctctttctttttgatttaaaaagctaatctttccagatttctgttcttttctcataggccgggtctgagatgtgtggccaacccacactgaaagagaggaaacaagggagaagggattctacgtggttttggggtagcaacgaaacagtacatgatacattagcataaggtggagagctacttgacaggaacgttgagatgcttcatctctcaaatcaatatcacttcctcatggctatctttatgacctctcagatctctgtatcatctgttctaacagcattccagaaaacttttcatagccctcatcacagtttataatttacacttgctgaacaaagacatcttaaatctttgggatatttctcggatagtgttttgaggcagaccccaagaattggtcatgatttaagggtgtagcctctttacagctgtctatgtgtgttcaatatgccctaagatattgttttctctatacagcttagatgttgcaattggaagatgttccatttgatatttaaacattcaaacaggatgctaatttgttcagaaaataagtttgacatgcacattttttagaattatctctaaaagtgaattataatttccttcttattagtcagtttccacttaaagaatgaactatacccctgagcgcaattgcaaattccagtaagtgtgacctctgctaacatattaatttaggaaagcttccccttaaattgttttcctgtggcatcaggtgaattgatcacaagagacttaataactttggattaagtctacatcctttataaatgtgtaatcacttcgcatcacattccattaaagagctgatatttgtaaggcaaatcattggattcttccaaagcagtttgctgaatggtcacacaaactaattagtgtttattacaacctacatatcttccaagggaaactttaagcaggtaatacagcatattttaactaaaagcagtatgtaacaacttaggagacagaaaataaatttaaaaccttacatattcttttaaagcttcccgttagtttctcaaaccaataaacaataactccttgaaagatcattcatggccactctgataaagacaaatgtgccatgatcgatatattttaattaaatagacaacattcatcaatgtggagatgcacatttacaggaccaggctgactgcatcagttcaaaagttataattgttttaggttttttcctcttgggatgcatgagtatgttagtcctgttaaagaataacttgctattttcaaatttcaatgagaaaaaaaaactctgcctaggcaaagaggtatgtgaacatgtagcaagtaaagattcatttgctcagaggacacaatacagactcacaacctatggatgaaacaaagtcaagcttcaatgctactttgtacactcctaagatctagtggagaagaaaagaagataggataaagagatactattttctccatttatgaagtatgatacctgtcatacaatctttttttccaacaccctgtcaggtcccagagaaaatgggtccttccattggtggatgagggaagattaagatttggtcttcaggctgacccaggtgaaagagaagcagcatcatgcattgggaggctgatctctttgctcagcctgctccaaagaatttcaagttcctattttcaaggtaccactttttatactcctgagtcacacaacccaggcacaaataacctgctaacctgttttgctttataacataacctgtttattttcctctctcttaattatttacctgtttattttatttttattatttttggaaagtaatttctaagacagcaaggattatatctctctggcttaccacagtaactccagaacccagaacatggtttggtatacaacagactctcaatcattgaatttcacaattcattttgtgaaatgagtaaatgaaggggaggtgcctaaaacacgcaataaccaatacattcaatcaacattagtattttcaccacaaaccccaaatgaaattaccagaatcaaaaatacaaagcaattttattcttagcattttccagcctgcttaaaaagtactatcgtgggcttaattctctcttctctcctgaatattttaactaaggagcttccatctacactgcctgatagaacatgcagttgagccaaagcacatcaaaaaaaccaaaaccaggccactgaagatcaagagaggcaagcctggcatatttttaaacataataaaaaggatatgaactcctaggagtgtagtccaagctatttgacaattccttgtggtatttgatttcatccagattagtagacaatgatccagaaagtcgattcaaacgtaggaatacataaagcataagtgacactgctgggatccaaactaaagagagactaataagaatttctcactgccccctcacctccctatttcagatatattatatcagatgtggaaacagttctttttcatacctgagccaacctgacagtctaaaaaagtgctgctttctctgattttaagttttggaaatcccactggaaatagcaaacaccatatgttaagaatcactccattacacaactagagggtattcttttcatataactttagaagccctgttgtctattgccaaaagaaatttagaagttgctttgacattctttacttcaattttccttaatttacagaactgtgaggggaaagtaacgtgtttagtactctaaatttgacagtaattcggctcaagaatatctttcatgttccttcaccttagttatagcttttaaaaaatcatgagagtaagacgcattaatcataatgttttacccagctaaacagaaaacacctggaaggcaaaaattaaccttgccaggaatacctaattgtcctactagcacagtaaatgatactgaccacatgattaccttcccagctactcaaatatcaggaatgagaaagtttcacggggaaagccaagtctacaagtactactaactaagtttgtgatattgggaaaataacttctgatctctaggcttctatttccttatgcgtaacatagatgaggggaagcccagctggtgtggtacaagtatcctcccttaaagcacttttattatgtgttttaagtattaagaacttgtgtgagtcaacgcagtgggttgaatggaagttcccaataaatatacctgtatgttttaaaaactgtaaatattaccttatttagaaaaaatatcattgcagattcaattaggaccttgagatgagatcatcgtggattacccgagtgaaccttaaattcaatgacaagtgtccttataagagacagagagaggaaagtacagaggagaacatcctgtgatgacaatggcagagactggagtgacgcaggcacaagccaaagtatgcctgaagtcactagaggctgagaagtggcaagaatggatcccatcctccaaagtcctgccaatacattgatttcagacttctggcccccagaattataagagaataaatttctgtggtttcaaccaccaacttgatggtaatgtgttactgtgaccactagaaatgaatagttaagttcccacaggtatcaaaagagaccttcataaagatacttttgcaagagggttcaggcaagattggaggatccaaatagacactctgagaagaacaagagcaagcaggaacctttgccacctttaaccacgaagaaacaaaggaagaaacagccttatctttattggaacttaatgagagctggcgctgtgaaggaggaggagttcagaggaagctgcaggagtgcgctagggctgcaggaagacacagccaaacaggacgggagctaggggagaaaggcagagaatgcaataacctcttctctatttggcctctcccatccattctccaaccttcccagccctgctttggccctagagagctgagtcctgtgggatataaccctcatgttccttggtttctgcctctggttggatttggacaatgagaaaaaccactcagaggctggaggacaaggaggagtgagaccaaatagagaacaacctgcagaggtaacaaaaaagatttagtttttaaaaatgaatctattgggcaaaagaaaggcataaaatctctgaagactttttccaggaactattttagttctaacattctgtgattgtctgaaatattgtatggaaacatattcctctcttctaaacttcatttttctccaccttgaaagaaaccatttctacgaagtttaacaaatctttaataaattcaataaatctcttcaatcagcccaatagaagctggaaatttaaaagaaacataaaatttaaaagaaacataaaagctggaaatttctggactactacattacaaacttctcaatttccttcttgcttggggtactaaaaagttggcatatctttcaaactctacttttcgagggcttggtgagacgcttcatttgcaaaattttttagcactcacagtgaactctgtgacccagggatattctcagttgtgtcctttgttttccagatttactgtgcaacctgctccttatcatagaatcttagagttggggaacaaaagaaattgaagtaactttcacttttattcatccttctccccacagagcaacattttcatcaatatcttgcagcagtatttcatcttctatgttgcaacatctactgaccaggaaagcaccatggctaatttatctgttctctgacttcatgcttaataatgaatgttgcatataaataatggtcaatgccagcagaaatgtatgttttacatttttcttgattttaaaaatgttttattgtacaaacatactatacattccagaccattacacacacttctctaaccactcatacccacttttttactgtgatagagatgctaaagttagtaagaactttcttaatacaattgtgatctgagagaccaaaatagatccttgtcaactgagactctgcttaacactaaggataaagaaaccaagtaacctgagggtcaagggttcaggggtcatctggcatggcaaatttctgaattcttatttctctaaactctcttacaataggagctatcggacctctcctaactttgatttgcaacccagaccactacaactctgaatggacagaggacaaacattcttttgtgataaactactacagatctgaggtcagtttcagtcagcttatagaggctgtgctcaaactctttgtgtcctatagtttaccttttgatgttaagaggcaaattctaccttattttaatgctataccccctccccaaagtgaatatggtatgatacatgtatgattacccattacacatgtgcttggcttccctcataaatctgtacagcttttcctttaaacatgctaaacatgtatgactttactgtgtaatacagtccctgtgaggcataaaatccagcctgtctctcccctttccaaagagagagcacctcctgtacacattatagactttctcttcctggcttacaaaccaatattgccaataaagctctccttatttagccaccctagtggtcttttggatgatgccatgaattcagatattctgattagtaagggaaaatctttctaggaagaaacgagtaccaaataggaatttactctgccatccagactttctctttcctttgagattattttctatttcactctcctgctgccattgcacattggccccagggtttatttcaatccctttaacactttgattgaacccaaaccaaatctctttcttgatgcctcttagtccagctaatacatgctggagctttccaaaagattttctaaacacaaagggataacataaataaaataaacacaatggctccaagaactctcagccacttggcttacaaaattataagattctgccctcgttttaggtagcaagtttctaggacagagagtcttactaggttttctcgtgtttagttgttgcccaacttcacccgtggcttgtaactcacctctaagaagagatgatataaggcatataaggaatgctgaaatgaatttaaaaacagaattacagtggatctgtccacagggcaatctgtccacattctgacgtttagtcaagaactaacaacaggggaagaggtttttttctacctatctgacagttttcattctgaatgtccagtatgaaattcaagtatcattgtgaaataaatactaggaacaatctcgcctttgaattgtttcttgtctgccaactacagaggtgccaccttgttcccaatataggacctacagtatagcaatatctgatgcagcttcagcataagcattttacctatgccatagaatagttgcccattctttacaaaggcctctatgtacaaaagaatggatgcctcaacctctacgtgcaaaaggccaatctaggattttttcctgaaaggaagttgaggactccaatcctagcatttttactttccctcaataattctttgaaaattgtctctttccatttttgaaagaagtgagtttttatccgttctctgctcctgcctttgtgactgcaacagaagagctgtaagaattttagataatgccaggtcaaatgatagacttacattttataaaaaccaaggacataaacaggagggccaagcagaaagtcatctgaatctaccttccggcactctgttatcactgctgtcaaagtcattgagccctgaaaaagcataaatacgactctgattactaaagatgtagaaaggcaagaaagggctctttggtgaggcagactcttaaaatccctgacagcaaatcttgaaattcctaacagcagccccaccatgatattctaagtatttctttgggttatctggtgtttcatgacttctatagatataaaaatacaggggagggtggggtcatgggggattagatccactgctggcagaagtttttgcagatgcactggtgagaagcaaagaaatgtgggaccagggtagggtataagatgaaatataattttttccttgaatttcattaggatgtttcataggtattctccactatgaacatagttttaagggtataatcatgactctcatacatataaaatgaactagtatcaaacatttcaactaattcattaatgaatgagtacattagtcaagtgttagaaggttcaaaggagttttcagagtatcacatacacataggcatataaggaatgctgaaatgaattgacaaacagaattacagtggatctgtccacggggcaataatcaattgcatttcactagacacaactaattgcatttctatgtaccagaattatttgcattactttcagttttctaccatttatagagttgcaaattatctcaaatgcaataaaatgtggctataatctagaaggatgaacaatacaagacaattggtaattatttttttccatctctttctttttttttcttttttttttttttttggcccattttgaagattctaaccattttttccaggcaaattaaataactttcaatgaccttaagaaaagttagttaaacctcaaatgatcaatgttgtgatttattttacaagtggtcaatcagataatgtagaaggcaatgctgcataaattctaataggctttatgattgtaagctcttggttttagtgcagagtatttattattccatcatactcagcaaagcttcattctggaagaactattgacatcaaattttcacttctcccatatctgaaaacacaccatccactccctcaagaaaataatattaaggtgtttaaaacaacttcaagattaaactactttagtatgtttagtacgttgtcaaaatattcctccatacatctatcatttaatgagaaaagctgttaaaaaggaaagaagagtgaatgactgagggttgagggacacaactaaaaaaataagaaaaagccaaaaggttattttgggactcaaggcttttactgataaattaatgaagtttttagactccaaaatgttcaaagctccggaaagaaattcattttaaagcccttctgctctagataacagcttgaaaataccactttaatattttttgtattgtgtgtttttatcataggtaatcgatgttatacttaaggcagcgtgacatttcaaatgattaagggcctggtgggggcattcacaacgcaagaccttttttgcatttacactaatgagtttataatgagggttttattatattaattatgactactgggagtcagaaaaaaagcagaagaaattcaagaaactttactctttaagaaaatggttgttaccagatttgttgacataggtggttatttgcacaaagagaaacaaaagccattatgactattaatcactacaagcttgctgtgctttaccgtaattactaaattaatttatccatgattcctgggttttaagtgtttccttttttctccccacagcatgaaattaaatctttacatagctacagcttcagcatttgagttggttggcatgcaaggccaagctgattggctagacacttctatatccacccaaccccccgattcagtctaatagcaaaattcagttcagaactaatctctctgttgctatcttgcagggtgtatagatgccgtatagttttaatatggcaaattgcttaccggaagcaaaaacttctagacccccctccctttagaggtgaggaggcaccctaaaatatctattgctgttgtgaacctgcaactactcactgatggcaattagagaaattctgtgtaattttaaactattctgtccctgatgggcataataatttcattgcgcttatgcagaatgctttttctacagacgcgaacatctgaagctgccaaaaaaaaacccatcatttggaaaaagaaacttttctacatgccctcaaaccaaccaagtgcagggaggattgctaatctggcagtcaagatagcaggagacaactgaatcagtacttgtgaataattacgaattgtgttgttccttaaaagcaatagagactaggaaatggtgtaatttgccatgcctgtttgtaactccagcaatatacagcctgtgataagatttcacactttaattcatctgagaacctggcggtgttttacaagcagtaattactgagaatctcaccatgcttaactaagacaagcaaaggctacagcagaggtcctatttttaaaattggtaaatatgatagagaaaattcaccattttgaaaagcactgggagagaattagggcaaacaatagctgactgacatcacaggcttttctttttaggctattgcaaccatgaaacagtgaaccagtatgaaattcatagtagaaataatgtattatgtctttctaaaaatctgtttattttaataaatttattgagtgcttctctggtccagacattgcatgaggcacaaggactaaaatggtttatttgggatgataggtatgcaaagaggctattacaatgccttgccctaagtgctgtgataatggaacatatcaaggccaatgaaagcagaaagcagagtgcatacatttatgcagaaaagttgcaattgtagctggaagcattagtgcaggaatgaagaatgggtttgcaaacaaaacaaaacaaaacaagacaaaacctcttatttgcaaagtcatgaagacatgttttaaagccagcaaatgattcaatatggttgtgctttagataaggatcagtacagtatagttgggctgtaatatgcacgacaaagaaataataaagagaccagtatagggtaaaagaagaaaatcttattaagaatataaaccccttgctcatttaagcaaaacatgaattaagaacacttgataccttaaaattacattagtcatgtgctttcatgaaacccatattgtaacagtaattctcaacatctgattaattaatatagcagctgctttgctttttagcttcttccaatcttgttagaaaatcatgaattggagtcttttgttccaatcttcttcctccaaagggattagaaactagtttccattgtaaattgactttcttgctttattgaatttaatagttctagcttcaatataaatataatacatatcctgtcatttttcattgacaattttgtaaaagttgggcttttaaataaaatgtaaatgtttcatttattctttcactaaagctgaaatatataatgatggaaatgtgtttatccacctccgtctccatataaaagacccaaaatcagtttaaacttcaaaaccttagaaagctgttgacaaaaaggatgaagaagtgttttgccaagcaaaacggcattagtgtcactgttaatttgctttaaattgccatagaaaggagattctcatctcatgctagcatttcttgttggcttaaaaccaaccagtgaatattacattttatgagctcagacatgaagtgtatggctaaatattaatctctcagaccactatacttatagccagaatcacacagctagtggactaatgcagtaaaataacttattcctcagttaaaatacttaagcatgggcttgaaaaacaatgtcactagtcccacctgaaatgatcccagactctgtgaactcaattgttctggtgagatcagagacctaatgaataaagagaaaattactataataagatattttcacatttgatttattttgtattgcctagaaagagtgaaatctgtttgaaaccaacagaaagactctgtagaaaggattcataagtgagagcttgagatgcagatcattcattcctctgttcaaacatttattgatcttctattataagcaaagtatggtgtgatatactaacaaaaataaatattagaggattccttacaatttgccacatatttgggaaagataagcctaattaaataagaacaattcaatgaggtaagcattatgaaatgtattcaaagaacactgaagaggggatggctaactttgtctatgaggatgaagaaagctttacatttgcaatagattaaataactattcaagctaacctcactgtgatagaattatatagctacactttgacatactttttgatggttcgagtataactgttatcccttaacattggccttggccatgtcacttactttagaagagtagatgtcagtggacgtaagactagcagaaacttaaaacttgtttgtgaatttggagttgcccttgcattccagatgaatatacgctgaagagctgctgtcatttcagcaggggctccaggtaaaactggcagtctaggaccaagcctagctggctacagtctgaagcagagtcactaacttaagctcagtctggagtactcaaactacagtcaaactgcaggtctctgaacattagaataaatgctagttgttgcaaactactgagttcgtttttttatgtaaggctgactaatacaatatttaagttgggtttcaaaacacaaataagaatttttaaggaagaagaaagatattccagatagatgtagcaacatgtaaaaaaaaaaaaacagaatgaaagtaataaattgcatgatatgtttacaaagtatcaagtaattagatgttgccaatatacagggtatgtgtagtgagcagcttaacattaaactgcaaatgttggttgagattacattgttaaaaaaatttggaatgtattccctaagtaatgagtagaaatttttatggagtgaaataacacaattactccgtgggttctcccgtccattataaaagttaaggggctctcttatgtgtttcccaaagcatagacccaaggttgagtatttaactgatttaccccttatctagctacacagtggaatggttttcttgattaaacacttgctgtttgggccaaaaaccttcacatagcaagttctgaatgacttttatcttttatcttttttttttttttttgaggtggagtttctctcttgttgcccaggctggagtgcagtggcacgatctcagatcaccgcaacctccgcctccagggttcaagtgattctcctgcctcagcctcccaagtagctgggattacaggcatgcagcaccatccccggctaatttttgtatttttagtagagacagggtttctccatgttggtcaggctggtctcaaactcccacctcaggtgatccacctgcctcagcctcccaaattgctgggattacaggcgtgagccaccacgcttggccgacttttatcttttaatttggcattaggggccctaagtcataggaaaagaaaggaagcagcagtctgatattcctctgactgtttcaagtcccaactgttcaaggaatcatcaggaaggaccatttggcttttaacagcatttgcactgggattgaccttaatttagtgccattcagtttccccccaaaacttctgccctcccagcaaacatagcaaaacttaaagaaatctttgccaaccacaggaaacacagcatctaagagacccttctgcagtatcttaaggtggcaggagatgtggctattgtcaaagcaaatatgctggagatttatggggactatctatgattgtggttcagggagcctgctcaagcaaacataaatcttggtaaaagagtcagtcaagccatataaagatgccactaggaaaatcacaactgtcaagagctgtacttattagcatcacgaaatcaaggaatgctatgaatctcatttacatatggatacatccatctcgtcctaaaccatcttcaaatgtagcaatatcgctatatcaccaatcaaaagacagtaggcaatagttactagagacagagaagctagtgattaaaacagaaatactgtaataatttctaacattgatgtagtgttctctgtcatacaaagtggtttcatgctcactctcttaagtcactacaaacttgtaaattaggcaatgcaggcattgtctaacttcttctttggatggaaaaaccaaggcttagaatagttaagacaaacttgtctaaggtctcagagcttgtcaatagctaaggcaggacttaagacaagtctttggctcttgagccaagccttttcatatgaattgaaagaatctccaaacaatcacgtgttgtatgaactctcagagtcagacttgtaattagctaagatataggaatttccatcttgtgctggggcattttcctacccaacactatcatcctatgagcaatctaatgaaatcaagagagggcttctagcagaatggaagccaagtgatcacttagtgaaacatagcaaactttatattgaaagaatgcctcagagtttacaaaacactttcataaccaaaatttaaattattgatttaaactctgtcatttactctctcaagggcagaatttgtgtcaaaattgcttaaatagtacgtcataggatttgacacataaattcttgtatatcagttaacaagctctaattttatgattattcaattaaggaaatatatgcccccagcagtgaaggactcaccaaaaattacgcattcagttaattaactgagattcaaaacttgttatcctaactcctagatcagacattacacaattatgactattcatattgtgctgcctcaatgctggagaagtatcactttatcttagtccccggcataaccaatagccaacacatgtacacatgcaaaacacacacacacacacacacacacacacaactttaggtatctgtatcatctagatgttaaccattatcctgttccatatagcttaaacatagttgtcttggcctgctattcctactctctagaaagtccggtgcattccccaacatttctgtcaattgccaggggctgttttcatggcttgattttctgcactctcttggactatcaatttcactcacttatcactccagcaaccattctcttatctgccctgcaccaacccaggtggaaggctaagttctttttcctttaatttttcaaaaatagattctgcaaaacacttatgagtaacaaacttactgaaggccttgtgtgattggaaggatttatatctcagaaaagcacattacttaaaatattagcaatgcctattaagaaaagctctttaatcacccccacactaggggatttctcactaaggccacttaattggtcatgtttctttggggccccactctttcctcatagctcaattttcattaaaaaaagtcctcagaataattttttctttccatccatattttatctacctttgtacattcaaagattcttgaatttactctcattaacataaaggttggaataatagacattgcagactatggaagatgggagggtggaagtggggcaagccttgaaaatttaccttttgggtacaatgttcattatttggtggtgggtaaactaaaattccagatttcaccattacacagtgtatgcatgttaagaaatccacacttgcattccctaaatctataaaaagaaaaaggaaaaaaaagaaaacatatttttgaatgtactctgccaaaataaacgtcatataatccaggttccctctttggtaggacagaggagctgccgaaacctttgaaattcatctatctctccttcctcccacataaatcactcttactgcgaggttgcaatgatgagatgcaactctcatcctagatccccacatcagaaaatagaagtgactacactctattcaggttttcaaataatactttttataatcttgttctaggaataagtgaaaaatttcctttggaaatagcagttggctatcaatattgcctgacactctgtcagcataagataccaatcctgagtctctacaaagccagatgctggctgaagaaaccatgtttaaacagaagagctagtgtgtaatgcaatcaatcaagatgcccataagacaggtaacctttccattatttaattagtgaaaagtttcatctttttatgtttccaaacacacacaaaaatgtatgtcctggttcttggatatccatttcctaattacctaaatagtcatgggtaaaactcaccattgttctctgttttgtaccccagctacagcaggtaaaagtacatagaaaaaaaattgctccttaaattttcttttctttttttttattttattagtatcatactttaagttttagggtacatgtgcacaatgtgcaggttagttacatatgtatacatgtgccatgctggtgtgctgcactaactatatatatatatggtttttgtaatacatgtatgaaagagaagctcctatagctgtctccatccccagagttgtctggaagctggtaataatgttaaaattcaatgtcatagttaagcacatgccactagtgtcagagttcttaggttcagatcctcactccaccatctattatctctttgatccatgatgaatgcttaaatgtcatcttgcttaacctactagtggcatttagcactatttatcacttcttttccttggaacactaatatggtttggctgtatcctcacccaaatttcatcttgaaatccaacatgttctggagggacccagtatgaggtaactgaatcatgggggcaggtttttcccatgctgttctcatgatagtaaataagtttcatgagatctgatggttttacaggggggagtttccctgcacaagctctctttttgtctgctaccatccatgtaagatgtgacttgctcctccttgccttctaccatgatggtgaggcctccccagccatgtggaattgtgaatccaattaaacctctttcttttgtaaattgcccagtcttgggtatatctttatcagcagcatgaaaacagattaacaaggtaatttggttctagtagagtgggtcattgctgaaaacatacctgaaaatgtggaaatgactttggaactgggtaacaggcagaggttggaagagtttggaaggctcagaagaagacaggaaaatgtgagaaagtttggaacttcctagagacttgttgaatgacttcatccaaaatgctgatagcaatatgagcaataaaatccaggctgaggtggtctcagatggaaatgaagaacttgttcagaaatggaggaagggtgactcttgttatgctttagcaaagagagtggtggcattttgccgctgccctagagatctgcagaactttgtacttgagagagatgatttagggtatctggcagaagaaatttctaagcagcaaagcattcaagaggtgacttgggtgctgttaaaggcatttagttttataagggaagcaaagaataaaagtttggaaaatttgcagcctgataatgtgatagaaaagaaaatcctattttctgaggagaaattcaagccagttgcagaaatttgcataagtaatgagaagctgaatgctaacccccaagacaatagggaaaatatctccaggacatgtcagaggtcttcatggcaatccctcccatcacaggcccagaggtttagaagcaaaaaatggttttgtgggccaggcccagggtccctctgctgtatgcagtctagggacttggtgtcctgtgtcccagccactccagctgtgattaaaggggccaatgcagagcttgagatgtggcttcagagggcacaagccccaagccttggcagctttcaagtggtgttgagcctacaggtgcacagaagtcaagaattaaggtttgggaacctctgtctagatttcagaagatatatggaaatgcctggatgcccaggaagaaatttgctgcagaggtgggttcctcatggagaacctctgctagggcagtgcagaagggaaatgtggggtgaaggcccccacatggagtccctactggagcaccgcctagtggagctgtgagaagggtagatccactgacagtttgcactgtgcaccttgaaatgccacagacactcaatgccagccagtgaaagcagccaggaggcaggctctaccctacaaagccacaggggtggagctgcccaaaaccatgggaacccacctattgcatcggtgtgacctggatgtgagacatggagtcaaaggagatcattttggagttttaagatttgactgccctgctggattttggacttgtgtggaacctgtagcccctttgttttggtcaatctctctcatttggaatggttgtatttacccaatacctgtacccccattgtatctaggaagtaactaacttgcttttgattttacaggttcataggtggaagagacttgtcttgtctcagataggatgttggactgtgaacttttgtgtaatgctgaagtgagttaagactttgggggactgttgggaaggcatgattggttttgaaatgtgaggacatgagatttgggaggggccaggagtggaatgatatggtttggctgtgtccccacccaaatctcatcttgaattcctatgtgttgtgagagggacctggtgggaggtaattgaatcatgggggtaggtctttcctctgctgttctcatgatagtgaataagtctcatgagatctgatggtattgtacgggggagtttccctgcagaagctctctttttgcctgccgctatccgtgtaagatgtgacttgctcctccttgccttctgccatgattgtgaggcctccccagccacgtagaactgtgagtccaattaaacctctttcttttgaaaattgtacagtctcaggtatatctttatcagcagcatgaaaacggactaatacaaacactttcttcaattgttctttctttatatgcctttcaggataccaacttcttctacttttcttcttactcactgatatctccttttattcttctttatggatgtttcctaatctctttgactttatagtattaaggtgtcacagggatcagttcttggctctcttttcttttttatctaatctcacttcccttgtgatctcaaactgtttttattactaatttggcatgaattttcctcctggactccagctttatatgaccaactaaatgtcttcacttggatatctaagcagcatctcaaatataacgaagtccaaaactgaattcatgatcaacaccttctccttaaccagttctttttacaatgcaccgcatctcaggtgatggcaaatatgtctttctaccatcttcttctctcgtgcctacatccaatcaatcataaattcctaacctatcaggaaatatgtccaatatctgactacttcttagagatcactactacttttgagtcaccagaattcctttcctaaattatggctataagttgttcccttgactggccaccttatagtaaattatcaattacaacagcaagaatcatcctagtctaaaatacagacagatatgtgccagtggtttgtcctttggttcttagccctatacttgtgctatattctccactctgttgctaggctgaaagcaagaaaactacatttccaaacccctcttgctaattgtactcttattgggtttttccaataaaagccttaataaaataaaaggcattggtgagattttagcattttggagaaaaaaaaaaatgtatgttctctgctctggcctctatagcagcagcaggaatagacttgagggaactgtaggctccaacatcattggtaattccagttttattggtaattccagaattagcaacagaggtaacttctacttagttgtggttgcaatgcttcttataaaatctacagcagtgactccagatgcactagcagttctgcagcaaagacaggcctatgggctacaaaaggaactgtggcagcattctgatttttggagaaagccccttctacctttctctctctcacctttagttccttatattattagggtgcaaaagtaattgcagtttatgccattaaagtaatgttgaaactcgcaattactttcacaccaacctaataattactctctgtttccattttcaagactggacataagttgatatgacatatatccagtaaattgatgtaaatgttgtaaaccaagttatatgggtataattggcacagaaaaaaaatgattattctgtttatggggatatcatgagagaaagccgcactttgggtctaaaaggttgagtttataggagattggagtgaggctgaagaaccaaaaaggcatcctaggcagacaaaacagcaagtataaagttaggtagatttttaaaaatcatggtatttggggaagaaggatggtcccagacatggaaatgtatatatttatatacagagaactcactctaccttagctgtttaattatattcagattcttcttgctttcttactaaacatgttcttcttaaccccttttaactccacagaattgcacactctaagtagccaagggcaaaattgggaataaaaaagattgtgtaaaaaagtttcacacatcctgcacatagctgaaaaaattagcagctatgtaacccatggggatgtattgaaacataattgatcgatgtttgtaaattgctttgagactctcagtgagtaaatacattgaaaagttctgtcatcatttttcttatctaatgtggtttgtgagagaataagttggtgagtggcagagaataggcagcttcccaaattaagtttgagaaggacaactttatatgaagaaaatagtaaacttctattaaattttattaagatatttttgttacaacaagcaataatagttataaataattaaacaataaaacaagtctaagcatgtgtgctttgaagtctttaatgcatgcctcaggcatgtgataaatcataatgatagaatcaaattgactttaatcaagaagcctgcattaatgacatagtaattcatactcagttgtctacttattgttataataccaccaatattttcacagattcaaagatccactttttccttctgcacggacatacacacctacaaaaaaaatccaaaatgcggattaagaacagatgtcctttccccaatgccagtatttaatattaattgtaaaatcttgaaggtcttttagttttaaatgtcacattttagaatacaaagcaagatgtgaacatagcaattcccttcacttcccatctagttagattgttcctgtgatagagttaaacagaccatgaaatggactctttcaaaactaaatatcagtagattaaaatctatagttattttcacacatttattcttcccatctcataaataggacaccctcaaaatagttcattctaaaaatcacagattagtgctttaaatagagataacctgactttattaaaatttccaaatgtttctctttgcatgcagccttgtcatcagaaatcatcttagttctctgcagttgtcaaaaacccacaaatcttcatggcaactggcaagtaacaaacaaaaagtttaggtctggttaacatttatgttatagtgacatatcataaagaaaacaaattaaatcctagaatcttgcctctttgatgcccagggatactaagttgtgcaactctgtaatacaccaatcatattgtattctatctgaatattgccccagacccaactacccgcgtgtccccagggcaaactaatacaattaggaccatttcacccaggattctagcactgaagggcagttcattaatttcatgattttattcttttttggctgtctttgaggtcttgaaggatgtccctatttcttatgattttgtttttgttttttgttttactttgtgtatagcatagaatggcaacccttggattatgtgcatatatataatataatatatataatctatatgatatattaaacatgtatacattaaacatatatatatatataatttttcccagtgtatagcataggatggcaacccttggactatgtgcttacatatataataatatatgaaatatatattttataatatatactacattatattataatcataattatataaatttttttcctttaaagccctcttcttctcccatgccaaagaaaactgctgcacactctatgaattaccagttgaatcatagttttatgtcttttcacgctacatcttgctttaaatctttgatggtacttgaagccctaatgattaagtccagactgattagctcagcattcagcctgatatcagtttatttttccgacatctcttcctgacacatatcaccttccaggcacagttaagctctgagctcaatcggccactccacatttctcacaaatgtcatacactttgatgcttttgtgctttcatttacaatattctcagtacttagaatagcattccgaaatttttcttttgaaaaacttatattaattattctatattagctttttttccagtggcacattgacttgccccgtcagatgtatgttatgcacctaataaatatttctaagatgcctcccatccatcaagcgttaaaagttggagacacaacagtaaaaagaacagaccctctgaccttaagaagatgactaccttgactaaataggtaattataacgagtgctgtgatagagaaacatctttggtgctacaatatgaataagtctctgctagggataaccaagcagaggtctgaaggataagaaggagttaactggataaattgtagggaatctcatttccattaaaaggtcaagctttcccaaactataatagaatacctcgaaatttataaagttttatagacatcatctcctttaatttttacagcaatgaattaggtattattttttccacttgcagatgagaaaagtcaggttcagcctctgagagtgaggttcaaataactttatattcccattttgtcttgtggtgatgttgagtcatattacctggtgattcagtcaaagttcaatcagtggatagaaattacacagtaatttcaacaggaaaagtttaatataaagaattagtaactataacaggaaagtaactataaaaatatggagagaactcttaagaataccctgtggctgaggaggagtaccctagagaggacaagaagaaaggggacccccacaataaggcaggaattcgaactttgttgaagatgtgtttgcggtgcattggatagtgtagaagttcactagtttccacaagccagtggtttgcagtcactgtaaaaccaggtagcaaccatggagtgagcacaaactcagtatggcaggcaggcatgaagagaaagggtgtgtggagcgtgctcacaggaggtggtctatggattggtatgggttgggagagggccacaggaaacaattctctgagtatcagacaagtcgaatggaaaccagggtgttgagaaactgcttgacagcagggtggcatgtgtcttggagtaagcatgtctcagagacatccatgtaaaaataaataagggagaacacatctgcctggttccctcccactgtctgttttccattgatcaatgctcttaccacaaggaatctcccacacttctgggttttgtcatctggaaactttggaagtcatttgagatgccaaacctcacactctgtagagtgggcttcatttaaaggtggaaatagcaggaaaagccagaagccccaggctgaagccgctcaccatagctgtgcagtagaggcacaaaggagggcctggttagcaactctggtcaagtgacttgtcagtccctggtggtgtccatgggtctggatggtggatacagttgagggaacctgagtacatgaataggtatctaatacacaccctttgaccctcttttctccatattccatggctgattaatccctaacacatgagtgggttactaccaaatctcaattatggaagccattttttctctttaagttacatttatatatttttactttcatagattctgtgctttgcagttgaacatgcagcataatattaatattatatatagtataatattaatatattttttctataacattttctgtaacattacatattatagaaaactatattttttaatatattttatatatttattttagaatgaatatatatatatattcattctagggcatgggaagtctcattctggatcagaagaactgacaataagccagaatttgaacctaggtccttttgccctttctattatctttggtgataaaattgaataattgtgttgtagacagactggtttcatcctgttgccccattgggcagtttttttcaacctattcattcccattagacttgtattcatttcctcccagactataggaattatgaggactccatgaaatagattaatcactgtctgctgtggctcaaatgtatgcattccttcaaaatttatatgttggaacctaccccctcaaggtgatggtattaagaggtagggtccttgggagatgattaggccatgactaggctctgccttcattgataatattggtgctcttataaaagggcttgaggaagatggttcattccttgttctccccttttgccctcttgctttctgccatgtgaggacactgtgagtagatgccattaggatgagacaggctctcatcagatactgaatctgctagcaccatgatcttgtttggacttcccaacctccagaactgtaagaaataagtttctattacctataaattagccagtttgtagtattttgctatagcagcaggagtgaactcaaatactgcttttcaaaggtattatgagaacagggagggtaatgaacaacccccaaacctagtttgagtagtatggctgtagatacatggtattttaatgttctgaaaacagacaagtgttgtgtttaaagccatgggcaccaagtcagatacaaattctgtatatatatgctgtgtgcccttggcaaaatcatttaacacccctgaactgtatctggaaatgaaaaaaataatgcttatttttaaggattgtcgtgggagttaagtcacacatatttgaaaaaacctggcccaaatgagaaacaacttttttcaactactcagtgttatgtgattaagtcctctttgtctttctctctttttgcccaagtctcagtcaacacaattgaaatgatgtcgtaaacaccaagattcactgtaacagtttctctctagcctttatttgattgtatttataggtccatgaatgtatgtataaatgtgcttgtctgagtcactgtctatatttgtataaaagtatcatctctcattatctgaagaatcatgaatataatttaactgatatacctgaaagacgtaaagtttttttttttaagctagaatgtagcttcacatggtagcaaggcgattcacatcttggcaagctttcatgtgaaaatgttttgctttgccatatggctccagatatggtcagttacatcctgttaacttttttctagacacacgctggttggatcctcctctcattaaaacacagcagagcccattaaagctcaaatgacaggctatttattcattcacaaaataagcatttgctcaacctgaaatatgtgtgtgacaccgtagatgtggaaactagtgaaaaaatttgagttatgaacacattttgggttctcatttttaagtttttaagactcttatctcacgagattattgacttttggaaaaattatactatttcttaacagtggaaaaactagaccaaagaaaggaaaagtttagtatttattaagcactgtatttgacagaacaggtgacatagtgcttagacataggctgtagtgcacacaaaggacagggaagggcaaataatagatctgggagcaagggaagcataattgacagagattttgtaaatcagcccttacacatttaatctaccgtcttcttgattccatgcatgcttctgcatcccagtcattataacattccacattctatgtggaacaactagagccttcaacaagagacaggaggatcgtttgtcacatttgccttcccaggttttattttttcctttcttttttttcttgacattccattctatgattgaaaacagcttcaactaaattataacctcaagctgttccagatttatcactcctcaccatgataatattttaagtctttgagttctcccatcatctagaacatttacatcaaaaatttgaagttgcacagatttatatataagacaaaataaataggcactttttatccttcgggttttttatcagacttataagctccaacccaacaggaaatactgtcaggcctcctctttgagataaataaaaatgtagtacttggaggaagttattccagatcacaaaaagattttagatagaagccagaggggacagtgactattaaagcttcagtaaaagtaaccatttatgtaatttctaacttaggattcagaaagcaaaaagatagagatttaacaagcatgtgcccttcaatgccatttaatccaattctgtttgaccctaaggcttcttttgaattaagactagtcatctacaatgttaatattcttgccttcaccagtcttcaagcacaatatctgaggtagatattgtcatcattatttacaaataagcaaactgatgctgaaggagaacagacacagaaaacaagtggcagaaccaagttcaattcctggtctaccttatcccaaattccatgttctttctacctcatactacattaggctgacagatgaagactttaacaggcaagacttattcattctccacttcatgtatttactaagtacaattgatacagaaacctctcttataccggatccatgagtaattatttctgcgtttcttaaaaattgaaggaatagggctgacaagtaggcttaaactttgagatccttgatgtgatgagaaagttgattatctgacatttaataggatctggaaaatttgccagtagcattgcactgtgtaatgaaagaggagactgcttaagagaagtatgatttccctgtcatcactgagaaagagattcaatgaagcagttctgaaaatccacagtggcagaataattatgccaaagcacagacatcaccttaggagggatggaataaaatgatcagggtcagtgtgataccagaaaataattaaagtttttgaccaatgggccatggtatctcatggtatctgtgatttgtaatatcttgataacaagttcaaaagcaaatgcttctataaccttcagctgccaatccttactcatatgacttgaactggtggagagatttaatacttacacagaaaacacacacacacacacacacacacatacacacacacaaacacttcctttcctggaggcttttatttctattcaaaactggaatcaagacatccaatcagtattcactacagggccttgggtaaaattgtgaagtgagcaaagttcatcttcagcaatctttaatcaaaatcctctttccacacttgttatcctcttagggacagctctacttacaccctttgctatccagtgagctagtttctgcctccttctaccctttcaaattgccaagactaattctcaggagatttggatctcacttatggtaatctatggtggattgattgtattagttgtctattgctatataataaattaccacaaattcgctggcttaaaacagtacactcttattatctcacagtttctggacaccaggcttagctggattctctgcttagggtctcccaaggctgccaaaaatgtgttggctgggccacattcttatttggggaagaatctgcttccaagatcattcagttagtagaatgtattttcttacagccataggattaagagtttataggtttttttgttttcgttttgtttttttttttttttttttttttgctggcttttgaccagagcctgctgcaggctcctggatgccatccacagtttcttgtcacatagactttcaacatggctcgtctcatcgggccagaaagaaggatctctacattgagcctgctagcaagatggattcttatattaggtaatgtggccataggagtggcatccccctcacttttgccacattctattgatcagaagtaagtcacgggtcccatttacactcaagggaagagaattccacaaattcgtgtgtgtgtgtgtgtgtgtgtgtgtgccccaaatagtcattttggtcaataaacagcaagaacgtttgaagaagagagaaaagtagcaggtttgtctaatttccatgaattctgctgaagaataagcatgatccacaggctagaagctttattgtacacccacgtttcgttgttatgtattcacactaataagcaatggaatcttgggcaaattatataacttcagttgattgatctgtaaaatgaataataaacataccttattgtcagttttgctatctagattaaataatcccagaggtaaaaaagaaactggctttagagttgctccttcctctttataccctgggccacttcctcctgcaaataaaatgtaactgtgcactaaatttaccagtagagtctcaagcaacaaagacaaaagggggaaattatgtatcttcagcaataatatttgaaagaaaatagtctttcttttatgactctttcataagtcagggaaagcagctctcaaacaatttttttaatttaaaatatgtaaatatattatttttgtaaaaattcaagcatcatagataaaaattccctgtgatcaccatccccagttgtatttataatctcagtgatactacttttattgattttttaaaatatattatttcagaactttgctatgcaattataactaattttatagatcattttgtcttacatgtgttcagatagatactattatactgtacataatgttcttttacttgttttattattcatcatattttctggaattatattcaggttagtacatacagggtaatattattttttaagctgtcctataatattttcatccccacattgcttcctgtggacattcaaattaaaaagaacctattctgttttttatttttaactatagtaaactatattgaaatgaacttccttgaagatatcttaatatgcaaatgtaagcattttttctagagttaaagaaaagaattgatgcaacataaactaaacattcttattttaatataagcttccaaaatgaccataccaatgtatactcccctcagcagtgaaaaattggttgggattaaataaagttatgtggataaagtgcctagtgcagtccttggcatgtattaaagtgttcaataaatgttagatcttattactagaataagataaaaatgagcaattttctgatagtttggtttcatgggaggatagaatttggaagaatagggcagtttgataagattcactaaatgcataagtgacaatgtgaaactcaaataagaatgtgatgaggacaagctccatacttcacaattttgcctaagaccaattcagagtgtacttagaactcaaatatattcaaattattaatctggcacagggatataaccatcatttgtactcaaataggtaaagccaagtattcaagccccaattgtccctctttagaaaattttatgtgaactaaattattttcataaattatacccatgttagattctaacagacctaaaatttcatttgtgttaacaaacatgaccacatgaattgaatgtgacttaaaatagaatgacttttcagtcctagtgcattgcacaggaataataaatgactcaagtaaaataaaccctaagtaataaaagtaaatgaacaatgatcaagtttctcttttaaaacactcaaggtatttgactctctaaattagcttaagaggagtttaattggagttctattgatagagctggtagacacaggaataggtgctgaaaaacaaactcttagctaatgttttaaggaaccattagtcaatagtgctaaacacttcacaggatttcattgtaaaatatgcttgtgcatttcacattctcattcattttggttttgtcattttaattgattgttatgtaaaaacaacgtttgccaatagaaaacatttagaaccaaaaggatgatagtaaaaattcaatcttgtttcccccagtgagtccccctcaaactctctctgtagaggcacctagtactgccaatttttctgtgtccttccagaaatattatgtttatacaaccatatatgtgtttgtagatatatttttcaacaaatgtagaagaattagacaaaccaatttgcattttccataaatcactgctaccatgaactacttagtacatgtaattgtgctcaaatgtgtcagtatctttgaagatcagttagctcattagaaggagcattgcttgggttaaaggctatgtgtcttcaattttggtaaatattgcaaattgtaatgaaggatgagaatttacatgcatatttcactaaagtttgtttcccaaactgtctccagatataatctctcaagtaattttttgtcaatctgatagataaaaaatggatggcatgtatttatttcataatgacattgactttattttttctaaccatttattctgtgtgtactgtgtactactagtttgtgttctttgtcaatttttctattagattgatattctttttctcattgattgtatgagtttttcatctattaaagaaagtagcttttttgtttatttgtttttgtttttgctattgtcagcaaggatttttacttcaattggttattagtctttcaaatttctttatcttattttcctattgccaaaatcttatagataagtatatcaatatttatttttttcatcttttgaggtttatttcttgctgagaaaaattctccaaattccagaagtataaaataatttgtcctctttctagaaaatcatccatttcatgcaggttttcaattaatttggattgagcaaaattacattttgcaatctgtacttaaattctccttcctatttcttattttgtgcctctgtactttctccactccctccaatattttatcttgattaaataattcatcatgtattaattatatttttcaaaagaactagttccgagatttatctattaatctattgtattgtcttttctctcttttactagtttcaggttttatctccacttgcttctgtttcccttctactttttctgaatattgtctgttttataactatcagtttttatctttatcttttcctttccttataattattttgttgtatttgtcctcctaggttcctaagaataaatgcttcattaattttagtcttttgcttttcaaatgatacagacttttttgtatttttaagtaatgatttattttccctttagttaagacaacagaaattaatttctaaatatatttaatataggttttcatttgaaaaatatatggaaataagttggccaagcaaagtagacatatccatgtaaaaacaaagaaagctcataattttaaaaaaggagatttagggaactattctgttccactgatcctatgacaacataccatattctgcaacagaataattagtgggaaaattaaagctgaaatattctctggcctttagttataggcattttaaaaatgaccttataagaatgtttagacaatttcaactgtaacatagcaaaataacgtttataattcaaactgatcatagctactaattttcaaaagtagaactgaaaaccagaatttaaaaaaaaattaatcagtttgtaccaactagagtaagactttgagccaataaagagtcttggctatataaaattggttctagaactgcacaatgaattgagagctaaatttctttggaaaagaggttgaagaggaccctgagtagaaggaatgcaaaacctagaaaaacaaaaattatatgaaggacatcgagagacagagcagagagaagcacactaatagaaacttggagtatataataaacagatatcttatgaaacattcttgcttttgagaagtttgtagacttttatggaaatacatgtctaacaataaggtttagattatttgttttgctttaatgtaaaaccaaaactccttaaggatgtttcctatacacacaaatatcaggtgcatgtggtttgtgggcatggggatcgagagataaccaagagaaagtgatttctacatctgggttagtgggtagttgaggaagagcatcatttggggagtaaaatgcaaataaactgaaagccagaactaaagttctcatgagaaatccacaggaactagaaaatatttaggcaagaatatttgagctcatacaagatatgggctagaggggttaagccaaatgtataatagtaccaaattaaaaacaggcctgacaccactaaattcagaggataaaatttcaaattggcataaagacctggagtattatgataaaattttaagcagaagtctccacacctctataatttttatctgtgttatattcagatatctttgatagaaagcttagactcatagagaagtatatgatgtaacatgtaattttagatatcctaaattttatgagttgattttctaaattctgaagttaaactgaaaaatattttacaaaatatataccttattataaaaataatatattactataaacttgctctgaaaaaaataaagtgctgtaattaaagaagaacattgagaggatccaggagctatataaaatggaaacattagcaatttattaatcagtgacaaatgaatttttaaaatataataattgaattagcactgccaattccagaagtctcactacgcacacttacctctggctcacacaacatttcattgaaatgatagaacaaactctaaaaataggtataaatttagagcagctctgatgtcaaagaaaaattacacaggatggagttaaatggggaagattttatttaagactattgcaataggggagatagactgaattcaattgtgcttaaagaaaaaataggagtttttaaatgctgtgctaagctagtggaaagggtactccaagacatccaagagattagtgagtatgattaggacatcagtatttgctaactaattattgaaattaggctcccggcttctcacagagattgggatataagagcactatttccttccttccgtgattatgtttctaggaagtggctctcagggccttgagcaagacattcctgggttttaagagtaactagaggttcaaggaaaattcatatcttaactaagcagagaaaaaaaaaatgcaattttaagttttctgaagtagaggctctaagaaaagggaggtcagggatccagagtcaggaagaagcctgtctaaagtttagtaaagctgaggggaattaacaccatcttggtcactagaaaaccagaaatggtttcactaagagacaaagagttaaagaaattctagataacaaaaggaaatatattgacttcaccagaaaactcaatagacagtgcagcctgagaatctctacaggaaagagagagaaactaaagaagaaagtttttcctgaaaaagccacggcctaacctcaaatcaaagccagtcggattgaaaaaattcagtgagccatcaggcaggtgccatgtaattaattaaagaccacaggaacagctgcaggaggctcctctctgagaagctgccctcaggttaaatctcagatagtcttctctatttaatggcagaaaacacccagcatgagctttgattctagagagaaaaagaggagtttctcaaataactttcgactgcactcaggagacagatgctgtgtggacctgccaggctccttctttgtcccgcccttctctgcatgaccatactagcagaatcttaaaatcagtatttgtattctctaccagcacaatatagatttttctcttgttgggtacacgcaatgccgaccgaactagtcttatttataaatgtgaaaaactatgccataatcactaagcagtcatattaaacaatcagaactgaccactgaacaaaacagttattgcaagaatcagaagacgtgctcaaattaattataaatagcatcctctgagaaattcagaatgatttcacatttattaaaaattaactgatcactatttaaagaccaatcagaatcttttgctgttaaaatgaacataatggggagggggtgtatggtagggaacctttaagatgtctcccaatgattcccccctcctggtagttatgcctttatgtaatttcttacctttgagtattgtttggatttagcaattctaataaatggatatagcaaacatgatagataacacttgcaaggctaggttacagagagactgcggtttccagcatgtggtacttcttttgctgtattacttgcttactatgaggaaagtcagctgccatgttgtgagttgccctacgaagaagcacacatcgcaaaaagctgatggagtcctccagccaatagttagtgaaaaactgaggatctctctccaacagcccatgaaaaactgaaccttgctaacaatcacatgagtgagcttgaaagtagatactccttcaattgagcctttaaataagacttcagccctggccacatcttgactgcagtcttgcgggataatttaaggcagaggaagcaagtgaagccatgcctgtattccagaaacacagaaactatgagataattgttttcttttttaagatatcaggttttggagcaatttgttctgaagcagcagataagtcatatgggtagatggaaaaaaagagagcaggcaggtggaaacttgactcaaggtcaaatggtagaacgactgtagctgaaaattaagttaaagaaccagaagattaagacagataatttcctcaaaacacaggcaaaagaaaaaagcagaaaaaactacatatatacatatataaatagatatacattaattatatacatacacattatatattaatgtatatatgtatacatatacacatacacataggtatatatattatatatacatacacaggtatatataatatatgtatatatacattatacacacgtatgtatatacaatatatgtatatatacacgtgtgtatatacaatatatgtatatacacacgtgtgtatatattatatatgtatatatgcacgtgtgtataaattacatatgtacatatacacgtgtgtatatattacatatgtatatatacacgtgtgtatacattacatatgatatatacacgtgtgtatatattacatatgtatatatacacgtgtgtatatatacatatgtaatatatacacgcgtgtatatatacatatgtaatatatacacgcgtgtatatattacatgtgtatatatacacgcgtgtatatattacatgtgtatatatacacgtgtgtatatattacatgtgtatatatacacgtgtgtatatattacatgtgtatatatacacgtgtgtatatattacatgtgtatatatacacgtgtgtatatattacatgtgtatatatacacgtgtgtatatattacatgtgtatatatacacgtgtgtatatattacatgtgtatatatgcacgtgtgtatatatacatgtgtatatatacacatatgtgtatatattatatatgtatatatacacatatgtgtatatattatatatgtatatatacacatatgtgtatatattatatatgtatatatacgcatgtgtatatattatatatgtatatatatgcatatgtatatatgtgtatatatgtatatatgtgtatatatgtatatacatatatgtgtatatatgtatatatgtgtatatatgtatatgcatatatgggtatatatatgtgtatatatgtatatacatatataatctatatattaatacataggcatataaatatgtatatatgtatatgtaattttgtatatatgtaattttgtatatatgtatgtgtatatatgtattagaaaattacatatagatattatatataaagttaagagatgtgaagaatacatgtaagaagtcaatgaatatttatttcccaccaaataaataactggaaaaataatttttaaaattactaatctgaacagttttgagtctttatgtgaaaagggccaatgagtactaaaattataattgaaaaaaaaaacacctagagacattgtgatgaaatttgttaatgcccaggaacaaatggaaaattccataaactaacagacagagtaagaaaataataaatatttccagtattacagaaaacattaaatcatgcctataaagggcttatggaaaatattttagactcatctaaattatgttcaattatgaatgcaaaagaaatacattttcataaattcaaggaatcaggcagctgaaaactaattccttccccttgattaattattaaagtatgctctccagcaaaacaaaaaactgaatcgaagaaaagagaatgaagaagaacatataaatagtaaaatacataattaactccaaactatatggataactcatttatgaagttcataaaatggaagactcttcagttttaaatagcagattgactgaacatgttttatcactcatttctccatttttccggagacctcactagaattatgataaataaatacaaaagcatcagcacacaagaaatggggaaaaggatatctacatttttgtagatttgaagattttaaccaaaatttttaatgactaaaagcaagtagagaaacaggaactgatttacaatggcagaggaagccatagactacggagacatggtcccaacctttttggcaccagaggccagttacatggaagacaatttttccacggactggagtgatggagcagatggtttcaggatgattcaagcatattacatttattgtgtactttatttctattattgcactataatatataatgaaataattacacaactcacaataatgtagaatcagtgggagccctgaactcttttccctgccaccctgcaactagacagtcccatctgggggtaatgagaaacagtgacagatcatcaggcattagattctcataaagagcacataacctagatcccttgcatgtgcagttcacaacagggctcgtgctcctatgagaatgtaatgccgccacttatctgacaggaggcgaagctcaggtggtactgtgagtgatgggcagtggctgtaaatacaaatgaagctttgctcacttgccacttgccagccagtcacctcctgctgtgcagtccagtccataacaggccatggataggggtgtggggacccccgctgcagggcatgctgtacagaatatggaaagaaaagaatttatcatagtagcctggcaaaatcttctattttagaattcagaaatttgatataggagaaggccgaaattagctgacaggctgaaatcaggaggattcacttagaagtcagtatacaacacaggctaaccctcctcacctcagccagctaccaccctggctctctttttaggtacaaaatcaaaggtgtttcttcaggagaaactgagcaaagactcaaggctctaagaaaatctgaaaaccagagatttaagttaaagtcttagatcttaattccctaagatacacagaatgccagcaactgggcatttataccccaagatgctgatcaattattgcttttctatctccccagttgaataatccccggggaggatgggggaacttagcatattggcacttgaagattctgcagcaaaatgggaaatttccagcctcaacatcctacagctgaagccacaagtagaacactcacagtcataagcatggagcttagctttaaaattagcttttaaaatgtgtgttcttagatacacatttttctgtttttttataaaaagttagcagtctagaaagagatacgaaatttctcatcttaataaaagataactatcggaattctacaacaaacatcaaaacattttgtaacattttcaaccaaaccactataaaaaaatattagcagggaaaagatttatctcacatttgtaagtgatatgatttttttctatgaatttccagatagctaaacagcgattaaaaatataaagaatgtaataaggtgattgagtacaaaaaaagtaaaataactgattttatatttattttattcattttatattgcaataatcaagtagaaaataaatcttaaaaaattaacaccacctactggtacatcaactgttaaagacaacaaagacagaactctaggaataaataaaaaaatgtgctagagttatctgagaatttattaattttatagagcttaaaagaagaattgtgtaaataaggagatattttacaatgctgagaatctgacgtttcagtaccataaagaagacatgaggtacagaaggacaatattctgtctgctttctccaaccatcataccccactgtctacttcagtgccttgtggcattagtttttatattgattacatgttgaaatgattaatattttaatcatatttagctaaataagatattgttaaaattaattttacctgtttctcttttttcagttgacttttagaaaattttaaattctatatgtaattcaattctgacatatagatgtcaatcaaaaatgatatgcttagtgaattaatgaaaaatgaatgatgatttctccaaaatctatgaatgtaaataattcaatttcaaagaaaagtccaatgtggtttttaagaaactctttaagctgacttaaagtttgtctaaaacattaaatgtgcaagaattgtcaattatacaacaaacagacatttgtcctcccagacaggacaaatactctgacaccacagttattactactacagttcatgtaaggtatactagttgataaataaataaagaaaaatatagaatcctgaaaaagatctatcacatttattcacataaggatgtgatgaatttggcatttggtgtagaaagctaaattattccataaatgtggatgtgatagttatctattggaggaaatagagttaaagccatattttaaaatattaaaaattaaattatagattaattatctagccaaagtcactcaaatgaccataaaatatcgtgggaaaaaaaatcagaataggtttggactgttattcatttattcaaccacatttattgactattgactatgtaaaaaataaaaggaaaggatagaaatctttgcccttagaggcttgcattataccaaaggaaaagactttaaactctaaatatagcacgttaattaacattatgttaaaaggtgacagaatcaagggagaaaaaatggattagaagtttcaggacagggatggaagtgggggtagaagggagggtgggtgaaattttacataaagctgtcaatcctcagaagtcacacttaaacacaggagggaaggagatgctgctctccaggggaagagcaattcagacacaggaaagagccagttccatggccttaagtagaagtgactaagggagtagtatagatgtgccaggtataagccatgggaaattagaagccattatatgtatctgttttttatgctcagccagatgtaacaccactaagctttttcaggagaggaattacagatgtgacatgttttaaaacaattactctggctgctgtattaaggggcgcctatggcactctaaatgagaatgtgtttctaggcaagaagttacagtgaagatgaccagaagctaacagtttctcattattttttaaaggtcatgccaacagaaatttctgatggatttgagtataagaggagagttaagattaacttcaagggttcgggcctgagaataatcagccaaaaagacaagtcagtggatagaggaggattttcaggaaagatcaacagtagttaaagatgattattagacatccaaatagatatgccaaataaagagttggatttaaaacttttgaagtcagaagagagacctgggctgggttgggctgggttgggctgggttggaacatgagaatggaatttaaagacatgaaactggtagactcaaggaagagtgtgtagataaagaagagaagagggttagagagagagccttgaattatcacaacattaatacatctaagaggatgagaaaatgagaaagactcaccaaagaaggccaagaaggagtaatcagtaaggaggaaagaaaacagaggtgacgtctcagagccaggagaagctaatagcttaagaaggaaaatgtaatcaactgtaataaaagatgtttagcaagatcaaatataacaaatactaagaatatatcactggatttagcacaatcaagttcttcatgacctttaaggcattttggtttagtaggtgagctaaaactctccgagtagtttaccagctaatatgtagtgaggggagatgaactggaacttgagagcagagaggtctcttttgaggagtttggctgcaatgtcaatctctgaaaagggcagtgtgcatagtgggggaggtgtaacttttaaaggtgttttttatttgtttgattaagatgcaagaaataacagcatgtttgtaggctggagtgaatgatccagtacaagggggaaatttgatgatgcaggggagacaaagtgaaaaattgctggagtagaaattccttaagaatttattaagcagttaagaggaaatgaaattcattgcccaactcagggaattagctttggataagtgtgtgaatagttaatccatactaaaaagtaaaagggatggatatgtgggcatagatgccaataagtaggtagataatgatggtagaagtctatggaagttattttcttttttttttttttttttactcacctcagtaaaaaagataatcatctgatgataaggctggtggagctgatgtcagaggtttgagaaggaagaacaaagtgtgaatggacttataagaaactaggaagtgaatgaaccagggagatattctatgatttgtgtagcaactttaagagcttatctggcacttgtagtcataaattttaaatgagacctatcaacatgattccatatttctatgcaaccataattatttgcattggtacagatgcaaagctggcaaaaggttggatttaccagagttgtgattttgtcaagtaagtttccaaattgaaagaagaacaatggaataaagaatatattcaagggaataaataaaatgattggccatggaattgaatttggataaagaggaaaaaaaggacatccagtggtacattgaagaacagagaagaggtggtaagacaaatggatgggaggtctaatttgagtggtggaattgttgaaattgtggtcatagaggagtgagctgaaaagtgaggttgtgcacaaaattgaaattatgtccaggtttcaattatgggtaataacaagtccagggtgtggccatagagtagtgatttaagtagagcagttgacaagatgatcataaaataagagatcaagtaacaggcaggtatcagaattgcaaatatcatgtatgtatatattgaagacaataagaaataagagaggcaaactgctcagaaggaactaaaatgtggagaaatgggggtagatagggtaggtaaattacaccattaattatagataatagataatatagtctaaagggcatgagattttaagctaaaattttaaggaagaggaaggaagaaggatctggaaatatgaaggatgtgcttaatggtaaaagatatagagatagaaataaccaccacttaagagaagttggggaatgccataccccaagagagatccaggttcaggttacagcaagaaagagaaaataaaatcatgacagagtttgaagacatagaggatttcactggtgatgaacagtgaattacattggtcccagtgaaaaaggattcaagagttgagagtgagtggaggatagaagaggaaattttcagactatatacaggttagaattttaaaaatgaaaagtggctgaggttgtgagaactgatataaaatgacaataagggaggaaagggcaaaatgagatgattttggttttctcaaggaagattgtgttaaagaggttaagtctgtagggagatggcaaatgatggttctggagctctctgaccttatcaatgctggttcagtgtctaagagaatgagatgttaatctcagtgcctgtatgggatgaacaaaatttacctggagcttggcattctccattaccaagatgatgaaactgaattcccctgggaaaagacagtaaattttttttaatcccaatccatggaaggtgcaggtggcagggggctgagatctgtttttggggcttgctcctaaccaagtaggggatgagtttcattaaatttgaatgaccaggacccctgcttgagctcttttgaaggagttgatttctaatggctctgactgcttaacttgtattagggagtctgaagatggaggaacttagaatttgatcaagtaatctaagtgcggccgtttaagcactctcaagttgaatattggagtagtgatgcaaatgctcagggtcacatggaattcatccaccaaattaagaatgtggcaatgaaatgggagagttccctggcccccctcgcaggacatgcaacagggaagtggctgtttggccactgcaagcccaaaccctttacaggaggggcaacacgcagatgggcagatgcaggaaccagggctagcactttggggcaccagccccatggcagcgtctaggagtggttgtctgcaaccccagtgttaccaagctctttcagctttgctgtctacagatgtcttgtgtgttaatcaactcaatggactctctgccttatcacaagggcagagggccagtgtcatagtcttatgtatcccgagcttttgcccagtatcctgtaagaatcggatcacacgtgggctcgaaggatgagtgcaaggttttactgagtggtggaggtggctctcagtgagattgatggggagccagaggagggaatggagtaggaaggttgtcttcccctggaatcgggctgcccagtggcctcttttccaaccgtccccagctgaactcccctcagcctccagatgtccccgctcttctctcttttccactgcattgttctaccatcactggtctgctggtctcttctggagcctagggtttggggcttatatggaggcaggatagggtatgcagcaggccaaaagacaactttttgggtgtcaaaacagaaatgcctgttcttatttagggccatcagtatccagggttgagggtggggcctttgacggggaaccacccctttcagtacagtatttccctgtctcctgttcatatcagcaatgagtgttcagggtagtcagtcttcatagagggctagcaagagtgacagtttctcacagtggtttcttgagcaaaccttttgagttcggctgcatgtggcctcccttggtttctacttaagagtcattcatcaaacttctaataggaatacttcctgcaactcttctcataaatccttttttttttttttttttgagttggagtcttgctctgtcgcccaggctggagtgcaatgatgcgctcttgcctcaccgcaacctctgcctccctggctcaaacaattctcctgcctaagcctcctgagtagccgggactacaggtgcatgctaccacgcccgcctaatttttttttttttttttttttttttttttttgtattttagtagagagggggtttccccgtgttgcccaagctggtagcgaactcttgagctcaggcaatctgcctgcctcagcctctcaaagtgctggaattacaggcatgagccaccatgcccgaccctcttttgttgctgttgttgttgttgttttggagacggagttttgctccttgcccacactggagagcaatggcgcaatctcggctcactgcaacctccgtctcccgggttcaagcaattctcctgcctcagcctcctaagtagctgggataacaggtgcctgccaccacattcaactaattttgtatttttattggagacagggtttcactatgccggccaggctggtcccaaactcctgacctcaggtgatctgcccacctcagcctcccaaagtgaaatcctcttatttttaaataaatcaaaaaagcttctcatatttgcagccttctattttttaaataaaccaaagtaagcttctgatattttcagcaaatagtatccctggatatgaacaagatctagctagttttcgagcttgtacacttttagaaactgactctagtcctttcctcaaggaaaggcagtgtgtgctatggtttgaatatgccccccaaatttcacatgttggaaacaacccttaatatggcagtattgaaaggtaaggctattaaaaggtaactgggtcatagggcagagaccttataaatggactaatccatttatggatgaatggattgatgggttaatggattaatgggttatcatgtgagtggaactggtggctttataagaagacaagatacctgaacaagtacattagcacactcagtcccctcatcatgtgacatcctgcacctcctcaggactcttcagagagtccccaccagaaagaaaattctcactagatatgggttctcaacgtgaaacctctcggccttcataactgtaagaaataaatttcttttatttgtaaattacccagtttcaggtactctgttataagcagcagaaaaatgaactaatacagtatgcattttcagttttagaattcttgatgctttcccatggctgtgctcctgaacagaattcactgatagtctgacattctcctctacccttagcacagattacaccaatcatgttcagcagctatttcttaaagcaataatgcttggatgaaattgtgcctgtaaacaaacagcatttagtgaaagcgtcacatattatgagtatttattcaattactagaaaacaggcctgctggttcttacacctgataagtaggacatagttattctttcccccacccccacccattcactttcttaaattatattttcttaaagaaaataaattttagccttcattctcattgttttcattgccacccattgagttgatataaagcaagaagaagacatgaaaaatctttgcaaaaagtggaatttttcaaaataagtaaattacttggactgttattttgattcacatgtgacatttctgacttcaaattaaaacatcaaattattcgccaaacacgaatcttgaggtttttcaattggttagtacaatctgtcaccccaaattaaatttctaaaggagtgtgtctttggatattatatacttcagagctgacagggacactatctaattagctatttatatgcaaagcaggggaagggataattagagacatggattatgcaaaagcaatcacactgacagagggcaaaagaaactgcgaacatattgaatcaaatttgtttttatatttctacagtttatcacatttcatttgtattatattacatttatgcatcatttaacatgttataaatgaagtaatatcctaatccattgattgattaaatataaatcttagaaaataaactatctattggactacaaatataataagcttcagtggataaaaggcaataaagacctacatttagaaaatgccttccttagagtcaagctccaatacttttttctccagagacacaggaaaaaagataaacatatttaactttctatcactaatagcgtagtcaaggtgcttatcaaaataaaaaaatcctggcttataaaacctgtgctagttagttatctcctgctgcataacactccaccccaaacttttcgagtaaaaaggtaaatattttattatgctcacaatgttgttggtcagaaaattgagagtgacacagagaaggtatcttgtctctactccactgtgactgggacctcagctgagataacttaaatgagtggaagttgattgggcaatttaactatggtcatgtatctggggcttcagttctggctgtcgaccagtttctttggttttttctgtgttgcatctgcttaagataaaatgtctaagacggcttcttcactgacagccttgcatgtaggctaggatggttggaatagctggaattgaatggccgtctctcctctttttctcatgcagcctcccccatggctagcttgagcttcctcacagcatgataatcttagggcaatccttgcatagtggcttactttcccagagcaaacattttcatgagaaggatggggaagtggacagtctattaaggcttggacaaggaaaccaccacaagtataattctacaatattttctggtgaaaatatgccaagattcaaggaaagaggacatagatttccatctctcaatgcaaggcatgtcaaagaatttgcaaccatttttgatatgctaaacaacctcatttccaccatgatgatttatcagaacctggaagattttagtaggactctgtgatatgacttcatataggctttcatttgcacaacagttcacccctcccaaagagtcagaaattcacttccaaccaattgaatgttttggtagagattacttttaaaaatctcttccaaagttagtgagttgaaatttatgtgtgagctcacagtttggtacagtgaactgaactctgagtatttatctcatatgttgtatttatctcatatcctaccaaaatccaattaaaatgatggtaaggaaggtaaaaaaggaatacattcataaaagtgcagagagggaagaaggatcattagaggggtagattaaggtgatgcgcttatctgtactctaagtatggaaggtgaagcattgaaatattgaagttatatagcatcatattgataggaaaactgaacagaaatagaatcagtgcagtgtatgctaaaggaatgctcaggtggaacctgcagaaccacactcacataagaaaattaaagaaagtaaaagcaggaaggggagcagagactgaatggtcataatgcctgtttattcctgcatatacaattgtactgtttgctcccaggtggaactaaagaaccattctttaaagagttgagtaacctgcctagtcacattacgagttgtgtgcagaaaggattaaccttgcccaaagataagtttggccctttgccttcagctcctgggaggaaatcttttattccttggaatatcatgcctgataagagcatctttgtttatctgggggctttcggccacaccagataaactatactaataatataatttataatggcagtcagagaagagtatattattgataaatcaaaaaataaaggaattaacaaatattttagttatatatataactttttgaataattaaatagaaaaaaatcaaaagtaattgcctttttggagtgggatgaaatcatggagtgcagaaatgtgttgtcctactctattttttaaatgattatttccattaacatagattcttggaatttttgtttgtttgttttgtttgtttgttttttgagacggagtctaactccatcgtgcaggccggagtgcagtggtgggatctcgactcactgcaaccttcacctcttaagactcaagtgattctcctgcctcagcctcccaagtagctgggattacagtagcgtgccaccatgcctggctaatttttttaaaattatttttagtagagacagggtttcgccatgttggccaggctggtctcgaacccctgacctgaggtgatctgcccacctcggcccctcaaactgttggaattacaggtgtgacccactactcctggccaggttcttggatatttagtagagtacatggccttccaaaatagactacactttcctgtttcctttgcattgcaacgtggctatgttactaggttttggtcaatggagtatgctcagaaatgtgtggcaactttcagaaaccatcactaaaagacattggtgggtactttttgcccctttgcccctttttactaatgaactttttccttgctgcctgaaacatagatactgtcttggaacataagtgtgaaagacatgcactagagaaagcatattcaggaagcagccagggtctttgagaacgtagtgggaaaaaactggcatattggccctaatctgcatagctccaaactttaacatgagagagaaataagctcttgactttggtataaatcaagttattttgagttttctgcatatgcatctaaaatttattctaatccatatatattttattaaaaaacaaatgtacattctgccatctattttactttctttttattttctcaatcttcacactccctcttctctttttcttttaaatatttatatttttaacatcagtctcttgataatgagatcgtggatgaagggcaatgcttgctttggttaaatagtttcatcatgtggacagaactcttaggctatcttctcatgaatccttggaataaagggaggtgaatattctgcctttagcacaccatcagtgtacttaagcactaatattttggcacctttgaaaagaacagggctgcaagacgttattagcgtcagtacattccttaagttattagtgaaatgaaaatggagtttcagacaaccagccaacattaatgaagcattccttttagtctcacaactgtgcataagaatttctatttcttcccaggttcacataattattattatttttacttccttggtatcattacataaaggtataacgtaaatgcaaagtgtttttacagacagagtcaaatggggtgctgagagaatctgacaacaccctggaggaaatgaccagatgcttgtcatgtacatttctaatgctattgcttagattgaagcaaatattggggggaggggaacccaaaaaccaaaaactacatattcttcacttcacattagcaaagacaacaaaacaccttaatctctgacttcctctgctcccatggtgaaattattctatccgactccatttctgcaattcccagcacaaataaaacgcctgtgaccctaagccaagtgggtaaccgttgacatgctgattaagcatgactgattaactgtacagtaagtcatttaaatcgctggtgcacagatgggcaacatatatttaattgtttaataactcatgctccaaagggaacttgctaatgcacctacaattaagaaacaatactgcttcagggaaacatgaattgacttaccttttatgtactgaggtcattatttggataaacttgtaaagttccattttagctctcatcagtcgtcacaggcatgatcatctgatgcagtaggaccctctgtcatgttgaggctcagaagaagaattaacctagcaattgtacatttcaaaatgtgcctctcgttattttgtttggaaccttttaaacttgttttatatttttatttatttgccagtcagatagtctcaaagagaactattatatattgtatgatgaccaaaagtgctttaggaaatagaagatgctcttcaggaacaactgaaggtgtatttattacaatatgtataatctgtcagctctaagcttctaatcaaatacaacttgagtaagaacttcagtaaggacacttactatctttcccaactgacaaagaacagctatgatttaaaacccatctcaaatatcactgaaatttaaaactaacaaatatttcttcagcacatatcagatactgcgtgctagtggctaactagctgctacttatggaaaacaaaaatacaaagaaatagacgtagttatgtgatgcataagaatgttttggttaatgactgcaaatatgatagaagtcccttaagattataatactgtatttttactgtaaatgttctatgtttagataaacagatatatatcattgtgttacagttgcctacagcatttagtacagtaacatgttgtatgggtttgtagccttggagccataactatatcagacagcctaagtgtgtagaagactgtaccatctagggttgtgtaagtgcactctatgatatctgtacaacaaataaatcacctaacgatgcattccttagaatgtatccctgtcattaagtggcatgtgaccatattataggtggtgtaaggaagtggttgtcagcacaggttttggagccagaatgcctaaattcaaatctttcctctagcatttattatctgtgcaatgctggcaagtatttaaactctttctttaaaataggaataataatgatgatagaactcacctgctacgggctgaattgtgtccccctaaaaaacatatgttgaagtcctaacccctagtaacttacaatatgaccttacttgaaaatagggtctttatgaaaataatcaagtttaaataaagtcattagggtgggccctaatccaacacgactggttcttacaaaagggaaagttggatacacagacaggcacactcagagggaagaaaatgtaaagacatgcaagaaaaacaccatgggaacacagacgcagagactgaactgaggcaagctagagaacaccaaggactgccagcccgcatagaagacaggagcaggtaaagaaggattcagcccagaatctcagaatgtcgcacagcagtgtggccctggaacaacttgatttcggaattctagatcccaaaactgaaacaatgtatctgttgttttaagacacccagtttgtggtactttgtcagagcagccagaagaatgaatgtgatatctgtacagatgtggtgagacagttgagtaaattaacatatgtaaagtgcttagaacaatgcctgccatatggtcagcacaataatttctgttaaagattttaatagaggaagaatacaaggtatcttgggagcacagaagaaagactgtttactccacaaatttgcagcttaaatcatcaaacatctgctatctcaaagtttgtatgtgtcaggaatctgggcatggcttagctgtatacctccggctcaagatctctgaagagattgtagtcatgctgttagcaggggctgtggtcttatctgaagacccaatcagtgtggagtggggaggaaatctgtttctactcttactgatatggttgtgggcaagtattagcccttcaccacttgggcctttccacagggccacctcatgacatggcagctgactctctccagacagagcgattcaagagagatcaaaagagactgcctaaggtgaaggccacagtgtataatctgctctcagaagttacagcccttcatttttgttgttttctgtttattagaaaccagtcaataagccttgctcccattcaagggaagataagtacatgagggtgtgactaccaggaggtatggatcattgggtgtcatctcagcagctaccttctacatgcaggaagtggaagtaggggggcttttcacatggtatctccagtgctttgcatgtaagaggtgctcactaactgttcaaaataaatgcataaaattaggtactaatttattttctacctttctgaaagtagtttggttaaggggaagacattaaagcttattccgtgtaataacaagtcaacttattgtgtttatatttagaaacttaaattagatgcaataatttggagaagtttttccaaagaaggagaagcaatacagagaatgaatcctgccccctttgtaataagttttaagttgttcaagtaagacaatatacaaagtaatattagtaaaattgagttttcaaatttttatttgtattaattttacaagtaatgtagaactgttcttactctgtttttatttaataaagcatacaaataaaatgaaattcttccctgaataccactaccaattctagtctctgagagagagagagaaaaaaaatttatattttgtggggtatgagtatatatgtgcatacatatgtatttatataattgttaccctatacatgcagttcttcaatttatcattttaatttaatctattttggaactcttttgtggcctgaatgggtttatcttaatacctaccttattaggttacttttaggattgcctgtagtaatgcatataaaatgtttcgaatagagcatgggcatttagtaaacatttaataaatatatattagctatttttattgttataaaaaggaagacaaaattttaaaggagttgcaccaagaagtttctttgtgatgatgaaacaattcagtactctaattgtagtggttgtggctgttaattttatgtatcaatttggctgggccatggtatccagatatttgattaaatattattctggatgtttctgcaagggtgttttggatgagattaacatttaacttggtgaactttgaggaaagcaaagtatccattacaatgcagatggacctcatccaatcatttggagacttgaatggcacaaaagaatgacctctgccacgcaaaagtgaattcggacagtagacggtctttggacttaaacagcaacattagcccttttttgggttttataatcacatgagccaattccttaaaaataaatctctctctctctctcaaatatatatatatatatatttgtttttgttgttgttttcacatatcctattgattctgtttctctggattactctggctacgacaatggtggttacacaaattttatctatacatgtgacaaaattttataaaactatacaccaaaagagaagaaaatgtgtgagtaaatgtaaaaactggtaaaatcagaataaagtccttagtttagttaatgatatcgcagcaatttcttggttttgaaaatgtgctatggttatgtaaaatgttatcattgggaagggtacatggaaacttcctatactatttttggtttcttgtgagtctatcataatttcattaaaaaaagcttaataaaatataaatctgattatatcatggtcacagagatgtgtaaataccacctattagaagggagataggggcatacccagtagaaaatatgaggaagtttgggggatcaaagagcagagctgacctgcgccttacctcccagggagaacctgagcaggtgggaagcctcttagaagttgatatagcacaagaggcacagaataaagatgttcactgagtttctaggcagattgatctgatcagctctagagtttccagttgttctttgtgcatccaaaagtagtacaggactaactaggaaatagctgggtgtagagacctggaagtactctatgaaggagacaccacagtgatcaatgtgtctcatgactaaaggacaagtaagaacaagagactttctacataggctagcatggatgataatggtataggactagtgccaatattcacacattggctctcctgactcccacaagacgttgaacacaatttctaagagaggaacaaaagccctgacatgactgagattactctaaataaagtgagattcagtttccagaactcggtcacatggtggcttgaacaagaaactggaaaaattaaagaagtcccatatcggccaggagcggtggctcatgcctgtaatccctgccctttgggaggccgaggcagggggatcacctgaggtcaggagttcaagaccaccctggccaatatgatgaaaccctgtctctactaaaaatacaaaaaattagccaggcatggtggtgcgcacctgtaatcccagctactcaggaggctgaggcaggaaaattgcttgaacccgggaggcggaggttgcagtgagccaagattgcaccacagcactccagcctgggcaacaagagcaaaaactccatctcaaaaaaaaagaagtcccatatcttgcacacctgggtttgtgatgtcttacttgtagcattgaatgaatggaccacaatgtcttttatcctctctcctttgatttttcctttgattttctctgtaaaacccagagttaaaaaatgagtagatgaagaaatctgggagtaagaatattttaggttgggattcaaatatggaggattatggggggaacctgcccccaatattttaacatacattctttctattttctctaagtgctggctggtctgagaaataaagaaaagagtacaaaaagaggaattttacagctgggcctccggggatgacatcacataccagtaggtccgtgatgtccaacctgagctgcaaaaccagcaggtttttgttaaggactttaaaaggggagggggtgtacgaacagggagtaggtcacaaagatcacatgctttaaaaggcaataaagatcacaaggcaaagggcaaagcaaagatcacaaggcaaagagaaaaattagaattactgatgagggtctatgttcagctgtgcacatattgtcttgataaacatcttaagcaacagaaaacaaggttcaagagcagagaaccggtctgacctcaaattcaccagggtgggatttttccccatcctagtgagcctgagggtactgcaagagaccagggcatatttcagtccttatctcaactgcataagacagatactcccaaagcagccacttatagacctcccctgaggaatgcattccttccccagggtattaattattaatattccttgctgggaaaagaattcagtgatatctctcctacttgcacgtccatttataggctctctgcaagtagaaaaatatggctatattctgcccgaccccgcaggtggtcagacctttggttgtcttcccttgttccctaaaatctctgttattctgttcattttcaaggtgcactgatttcatattgttcaaacacacattttacaatcaatttgtacaatagtggtcctgagtgatgtacattctcagcttacgaagataacaggattaagagattaaagcaaagacaggcataagaaattataagagtattaatttgggggaacagatgaatgtccatgaaatcttcacaatttgtgttcagagattgcagtcaagacaggcataagaaattataaaagtattaattttgggaactgataaatgtccatgaaatcttcacaatttatgttcctctgctttggctccagtcggtccctccgttcagggtccctgacttcctgcaacagaggatgagtccattttcctctattatccttactttaaattccaggaaaaactgactatcattaagaaatttatttcaaataaaaatttgtaaagaaactgctttcttcaaatcttcaggcctaaagatgaggctctgaatgtatttcacagatgcctggtaagttgagtctatttttaaggccttagtctccttttcttcattaaaaaacaaacaaaaaatgaagaagaaataaaaaatataagtaggttgtttgaagaaaatacaatcatgcatttcagaagaagtacagttttatgaagctgctctaggcagagtaagatcaggtgagaaagtctttttctgaaaagtttttctttgtttcttaattctttatatggaaaagtgccattagagtctctctggtacttttttttctttttttcctgaagcacaatgcagacattttggggaaaaatagttgcccacctctgtgatgccacaacttgaatggtgtaattctgctggcattatggagggctcaagcttaagaaaaaaatatccttataattaagaaaaactacaggttatgggacacaatgcacatttctcacctagactcccactttagcgtagggtgaaaaaacctttatcaactggcttgcttgatcctttccaataaagccattagtctctaggaaaggtgtagagggttgaaaactttgctttcaatcaccatagcctaatcccagattgcctctgttcaaatctgcctttgtagttgaaattatggctttaaaattgtagtgaggattcattcaaaagtacttcaaaaagccaaaaatgccctggtgacctagtcagcatgatatgggccagaactctaagtctgggagtgaagggaagaagggctaaaataagagttcagtgatgggtaagaagtagatggcagactttttccagatagcttcagatgaaggtacaaaaagatatgagattgagatttgtggtgacattatccaatcatttacttggtacaatctttgattcaattttttgttgtggatcagtgtttgtgtatgttataagaatagaataatggcctgatgaaataaaattaactcctggatgatagtagcagtctaatcatacttcacacagaagtctgcattacttatttttctgtttagctatactacttttgtcattgctttacttattaagataatttatgataaataataaaatttgctgaataattaagactcattaagatcattcctgaatctcattctgtactatcaaataaatacttcagctttgtgtattgtctcactataattgacccaaggtaatgatgtggctctgatgaatggaggaacaccaggttcttagtctggagtggaattagaaaaaccaacatgacacacgtggagtagttttaaggagcaggtcctttaacagacaagaaagaagggaggagaaagaaagaagaagctccccaaagacagagggaggcgggctccaaagcggagagacaggaccccacatttaggtaatatcagccaggtatattcaatttgatttgcatagggctcagggtattgttttgaccagtcatgtcattcgtgtagcccgcgaaaaatctggccttcccaccctagccttttaatatgcaaatgcaggacgccatgatgttccacacacatggggatatgtgggcgtgcccatgctgccaggcacatgttggggcaagggcaagaggacaatcatggtaatcgccatgttgagtggacccagtttctaatggcttgcatttgctagacaagagcttcgaaaaattttccaaggaccccttttttcctctctatctgcctaaaataatttcttaataactcctacctcagtagtaagtaaaggagctcttttctttcaacgtaccttagtatggaagtcatctcgcccctattaaacatttattttagaaacaggaacatgtcagtgctattaaaataaaatcctgttgttattcattggagactcattttatcaggatcactttcattgtttttactcaagcagggacatatttacatgtaaagtttcagcttcttttctatttttaaccacctttgccacaaatcaaattgagaagacaatcaggctttttaactactcatcttgtggcagcctctgaactaattacttgatatgcattagaacaccgaatgttcccatcaagtctgggcttctcttatgtagcatccttctactctgtgtatcactcatccttccttctgcttatactctgaaaaataataaagcctaaaatgacactatatttgaaatcactaactaagcattctccctcccaaccaaactcacctatcctgcccacttacttactcaagtaatcctgccaaaatagttgtttgacatactttagtaaccaataaattgatctctccattctctctctagcccagtggctctcaactgggaacttgtgccttctaaaaaacaagaaaatgtcagaagatatttctggtagttaccactgggtatatatgctatcaagtgggtagaggccagtgatgctgctaatgtcatacacaggacatctcccacaacagaattttccagcctcaaatatcaagaatgccaaggttgaaaacccctgcatttagtcccttgattgttttcattttcttagtcttccatggtaggctcaacagtccatcacaacatctctttcttgctaatttcctcaattcttttgcccatattaccttccattaccactctttgcaaaacttccaatcttgtgttggttgttgactccctgtattagtcagggttctttagagggacaagagtaataggatagatgtatatatgaaggggagtttattaaagagtagtgactcacacgatcacaaggtcaagtcccacaatcggctgtctgcaagctgaggagaaaggaagccagtccaggtcccaaaatctcaaaagtagggaagctgactgcagcattcagtcgtggatgaaggccggagagcccctggcaaaccactggtgtaagatcaagagaccaaaagctgaaaagcttggagtccattgtttgagggcaggaagcatccagcacggagaaagatggaggccagaaaattagccagtctagtccctccatgttcttctgcctgcttttatcttagctgtgctggcagctgattagatggtgcccacccagattgagagtgggtctgcctttcccagtccactgactcaaattttaatctcctttggtgacaccctcacagatacacccaggaacaatactttgcatccttcaatccaatcaagttgacactcaatattaaccatcacaccccctaaaaagaccaccagaaacatttattgattgaacaaagctaaacttattcagatgaattaagtaaagaagaggacgatcttgacagtgtttttatagtatctcacaaaagtcaggaaaatgcatttatcaaatttatgcttagatggggtgatttaaaggcaagttttaaaggatggggaaatatttgggaatggcagaatttatgacacactagctttagattggtggacacagtgaaatgaaggtcttgtagtattataagcaagctgctagtcatgaaaagtaagctattcagttgtttcagtcttatccaggagcaaatatttcttggaagaaggagctaagtgagttttttagcctggtcttggtgctgtttggcacagaaacaggaaagtattatttatacaagaattaattaacatagaaacagaaaagtatgaactaactaactttcagagaggctcaataacttgcccaaggtaaaagacctagcagttaccagagctgggaatgcactcacaacttatctgactcctctaagcatttgtcttctttatacaacactgccattagaaaaagagaattgatttttttctttttgtttccaacattctcattttttctctctatttctgtcaacattcatctgtgtttttctatggcttttttgatctctttgagtcttgaaatatagaaattgttgcctctttagtcccataaagttctgaatacagtttgaacatatacttcaaagttttctttctatttttaaaattttatcttttagttatcgagtctttcttggctttgaattatatgaaactttaaaggtcacaactgctttttgatctaatagaacactatgctcctagttgtggcaggctcggaatgtgcaactcagatctcccttcaagaaagaacttgcaagaaattcagttgtaaggaatgtagttagctggcagccctcagctattggcatctgcaagaattgtctcagagtttgaatcaagcccactctcatcccaggcaaccctcaaccaatatctgggcaccattcctccccagctggaatcctctaacaattcatctctgcttcagaactatccagtgagtttgcagacactgtcagaacttcatttgaagctgaggctctccttgcccaatctcacctcttctttccttttctttcacaggtttcaggttgacttgaggatggtaatcttttccctgctcaataaacctcttacattcctaagaccatctcaatgtctgctttcaggagggcttaaatgacagaatattacaggactaattttctatgccactgggcaagtcattttaacccaatgcactaagtgttataaatggagtggggccaagatgttttaagggtgtactctgtgcggagcaaattatatactctagcttgatgaatcattacaataatttctgagataggtattattctcattttagagataaggaacctgaaacctaaataggttagatattctgcccaattttacccaagaagtcagcagcagagttatgaatgaaacatgactctgtctgactcaaaatcctggatgctggttgttatgcacatgatctcacacaggaagatgttagctgctatgactgatacaagaattgcaagatcctctttgttctcaagcatttgtaagatgtcttttagttcttaaagggtatgattcggtgaaatgaattaaatgctctattatagtggagaagaccctgggagctgtagaaacccccatgttaagcagaatgctcattgctatatcactgttatagttagagatgcccataccgtatcccagattttaaattaaatgtcaaatttaatttgactgaagaagcctgaagctcaaagtctatcacagatcacagagctaggcctgacagctgccttgtaaatcaacctgataagaagaatcagggagtaaatgataaatcactgtttagtgcatcttggcctcataccacctcccacatcccctaaacaggtcagcatcccatttgaaaggattctttatgtttataaactaaacaacaaagatgtaccaatccagacagtgagaaaggctcagcttacagatttctaccaccatggaatttctttgtcatttcctgactttccaaacattcatgtccaaagttcaactcttaccttcaagaagaagactcattccattatctagctttcattgatttctctttttctgaatccaaaactacttatcatttgacaatacattttaaaatttgatgctgtcattcttttattcaacacacatttactgactacctacaattgcaaacctttggtaggcaccatgggagacacacagatagacaaacgtctctgcctttggaaactgaaatctagttgagtagatactttcaaataacatagggagggatgaactagaagagcttgaattgggattcaaccttgccagttactagatgcataaacttaagctatctatctaacatttctcgacctatgaaagatgaaatataataaaacagagagcactaccagggtcaaatgaaataacatttacaatattttttattgtaagtttctgtacagtttcttagttgttgataataataatattatcaataaattattaaaggcaaaataaaataaacgacaatagagatacaagtaaagtgttattcgaatacagctgaagatttgtggaaattttatttaagctaagctagtgtagatgagtaaagttttggttatgaagtatggaaaggtgagcaatgaatagtttaaatagagtattaataagtaatacagtgtcataaacaaatggaagatgatatgaaaatctatgcttcgtataagaaggaaaatgtctgaaataacttatgcaaagatggctatactaagaactaaaatttgaaaggtagagtagggccttcttagagaaccttgatggaggtgtgagagtgtgaactttctttttagggatgtccttgtagtggacatgttttgttttacttgtgtttttcactgatttcaaggtttgtctgctcagcatcgttccctatgcggtgttattctggtgggatttttaatcatgagacaacatctgctaatctcaggggtgattattcaacttaatcaagttggctttgcctagaaatcagttgccctggcctagaaatttgcattttgagcagagccttataaaaattgatcatgactgaagctgacttgttcaaaggcagagtcctagagaagacctgattctcaggtctctataactaccctttctcttgctccgcctgaagtcagttctttcaacttttcttttgatacactgttactaccagtgttactgagaatcactttctatggtggtccactacacatctctgatatagtaaagaagaactctgagattaatatgatctgacttgtagttatactgtgttggcaaaaaaatttttttagacaaaagttcaaataaagaaaaactacagccgttcttccatattcatggggaattggttttaaaatgcccatcagagaccaaaatccacagatgcttaagtctcttatataaaatggcatagtgttgcacataacttatgtgcatcctcccatatactttaatctctagattacttatactatataatacaatataagtactatgtaaatagttgttataatgcattatttagggaataataataaagaaaaatgtctatatgtattcagtacagatgcaaccatactttttaaaaaacacttttcaacctgtggttggttgaatacatgaatgctgaatctatagctacggagggtcattattgtcataataaacacctacagttattccaatacattcagcctagtttaaatttcctgaaacacacatctatctacacctctcttctgcttaaaatccttcagaaaactccacactacttagaggaaaatcaattttttttggcaaccattgcaagttcctcagagaactagccataattcttatgtccaacagtacttcactactccttttcagggctcctaattttaggtctatgtgaaactactcactattacctgtatacaaccctcaatttttggcttccatgacttcttgaacttcagcagacccatccttagatatgtctatgagaatatagctctggaaaaaagggtcataagagaaagcctgttttttcctcaagcaacagaatataaacgtttcacctaatagtctgccctttgtgtctttctgaatggcaccagcatatttattagcaagccaagcacccttggaggaacagtgacattatcatgttaatgtcttaaaaggtaaaacagttgactttgttctgttctgaaggtattgcccttttaattttaatagcagggtttctctaccaagccaggtagattacctctgtaaatcttattaacaaggatacgagttgcactactaaactgctgagaagttctggaatggctcccttagtgccctcctagtcagctttgatggtaaaccagagggatgccacctagttagttgcatagcaagattcagggaaagcatgggtaagaggcaattactggctagggttggctgatggcatttattgagtacccactgtgtgcagagactttaggactgccagaaattaaaagcaaagtttgtcccacaaccttggaaaatttgcaaactaattaaaggtttagaacatgcacatgtgaacagaaagtgaatgaggaactaaaagaatgcagtttaacagtaagtacaagtgacagctgaggcaaaggaggaacattatggaaatatcattctctccacccattcttttccatccccggccccatcagcagaggaagtcaccttctaatttgcactagtagtacctaatacttcatctcttagtgcttgttaccttgaactctaattaatatttacttgcctgtcttctccactgagctttaagcagcctatctgatttatagctataacccaccccttctggcattacctggcagagtacaaactcaatcatggaacattgaataccgaaatagatttgtttattgcatgaattttatttattgagaaggttatgagagaaaatcgtggtatacagtttaagggtggatctccttaggatatcaacattttacctttaaaatttttcagtaatatttggcctccaaaatttcatttcataaagtaaaataagcaatctttttttccctcatcccattagttcatttcttatttatttatttatttattttatttcttttatttacttattttgagacagaacctctctccatcacccaggcccaggctggattgcagtggcacaacctcagctcctgggttcaagagattctcctgtcccagcctcccgagtagctgggattacaggtgcccaccaccatgctcggctaatttttgtatttttaatagagacggggtttcaccatgttggccaggctgttctcgaactcctgacctcaagtaatccacctgccttggcctcctctcaaagtgctgggattacaggcatgagacaccacaatcagccccattagtatatttttatcaaattttcaaattaaactaatgtagttattaaaattgaaccttctgtatatcattctttcaacatttaaaaatctcaatttaaagtgctaaaaacctttaattttgaaggactatatattatcaaaaatgtttagacatatagagtatccataaagaatgtataattagagcattttgtatctgagtttttaacaaaaatacaagaaatatctgtgaaaatagataatataaaagtaaataacatttcttaatagtcttgctaatgaatctgatttacaaaaaaaaatagcggtggtgcatacatgtgtgtgtgtacacatgcatgcacgtgttcttgaactcaccaccaccagtcctcttgtaataataaaagaattgcaaggtctctgaaattttaagctacttaaaagtgcatagagctctctacatttatttcagtgtaatcatccaatatgaatttattggataccacctctatacaaagcaccaaaatggttttgtaccacaatatggttcccgctctctaaaaacttatgctatagtgaggaagagagacacataaataagtaatttcaacagcacttacaatgtggcaggtacaatgttggaagtatgcctagggtcctgtgaagacacatgaaaggagtacataattcagttatttgcctattgtgtatatgagtgtgtctgggcaaaagattttataaactgaatcttagagtaggatttagtaaatttaagaaggtaggtgtagattcatttctagcattacaaagacatataacaaggccctgacctgtgtgaagtaaactaatagcccctgataattatgcgagggtagaatgcagcagggagagaagggtggagatgaaaatcctgagaggtgggtagcagctgtgtcatggagaaggtcacatgccatttgatgagcatgcactcttttcattcaaagatgttcttgctgtaaggcaaggggtaactgcatgatacatgtgattaatcatgtggctagtcagtggtatgcagtcacagtggggtctgcagaaattttgtttgtcccaaaaaaagttatttatataccttttccctctcctatcgcaagctctttaataatattaatggctagcatttatttagtactatttgctagacataagtttaagcactttacatatgttaacataagaaatcttcacaaaaagtcaatgaggtaggaataggtattatgattaccactatatataagagatggacttgaggcaggaaattaatgttatagattgacttcctcagaaacagacatggagacagcattcagactgcaaaatattttactggggatcaacatcagtgaaaagaaagaagaggaagaagcagatacaaaaacaaaatgagccagataattaaggaggtaattttattcaggtcattctaatggggagaatatttattaatgataactgtctaaaataagagggagaaaatctagtttcataaaacaagagtgccattgaggaagagtggaggtaagtcttaatctcagagtatgggagagcaggtgttccctcctggttgcccattttccagaacacaaaaagtttggaggtgtggggggcagagggagcagcagttcttagccattgcgttctctgtaagcatgggactcaggtaaagttcaacagtgttagtcctccacttttgttggagaaaaaaatatcattcatgaatgaacatctcagaggtcataataaacctcttgtgtgggcaaagcagggtccaaaaaattgcctctcaaggactcttgttagcaaaaccagttgaactagctattaagagggagaaacaatgattagttgccttaggattctggagatcagatatctcaatagagggatgccttaggtaatattaagagattcatcagaaatattagtataaaaagttgtattaaaataaagaaacagcatgtaaactctgaaggtaaccagtctaatggatgccaagatgtctgtggagggaaattggtgaaacagcagccctcattgatttcttgaagctctcaagctaggattgctgatgcaccaatatcttggtgatatggtccaaggtctcggttacctctcctgtaagggcaggcatgactgactgagcatttcgtgcaacttcctttgtgatccggacaatacaaagagaatgcagcttatgcttagtctggctgccagaatgagtctttttaagcttttactaacttatgaagcttcagtttgcagagcttctttttttttttttctgggggcggaggcggtgggggggcagcgtattactcttgtcacccaggctggtgtgcaatggcgtgatctcagctcactgtaacgtctgcctcctgggtttaagcgattctcctgcctcagcctctcaagtagctggtattacagagacctgccaccatgcccagctaattttttttttttttttgtatttttagtagagatggggtttcacgatgttggccaggctggtcttgaactcctgacctgtcgctttggcctccaaaatgctggaattacaagcatgagtgaccgcacctggcctgcaaaacttttttagatcctgcagataggggccagccacacagcaatctagtgctccaacagggatgtaggcattaaggttttattatttagtaatcttgattgaagaaggaaggtgaatcatcagaaaaagtaagtttggaagattataaccacatattgaggaaaattggaagaattgaaaacttggaaaggattgataatttgggcaaggtaaggatttactagatgggtaccaaaattgagttttgtactgttgtattttttggtggggggaagcagtaaattaaatatccatcaggcagagtttgcatatcatcagttatcccaaatttataaagaggtgcaaagtagctaaaaataatgagcagggctggaatctgataacctggaatggtatggtatagaaataggggcaggtcttgagggaccacatgctgccttgtggaagaggcttctgcagctgtatttcagtgggggtaacacgagagtgaaaaaagttgactcttacaagaatggtgtggggcaccactgaaaatttaggaggtgcagaggagtctgaattttcaaagtattccaggaaagacatcagatattccattccaaggaatgggcaaagatttcaggttttcctaatgaagggattgaccttggcataaagacttgccttattgggtgtttaaccatctttgaaattcagctactgtgactattatgtcctaggcttggtcctggctttgtcagccctctgactcagagatgagcacttatttatttatttatttaataaatatgcaaccagaaaagccctctggctttcatggttgacttttgatgacctgtaacttctcctcagctgtctatttttctgggagcaagattcttaaagcatgtttgtggaccagcagaattagcatcacctggaaatgtgttagaaatggaaattactgagtcccaccccagatctattcagtcagaaattgtggcattggcacatagcagtccgtgtttttaaaagcccttccagtgattctgatatacaccacagtttgaggactgctacagtagtgcaccaatgatgctttgcaataactatcttaccctaatatccttatatttactattttcttcttatatttcaagtatttaatatattgaacctgctagtgcatttccatccatggtactccctcccagctccccactgctgaaagttaaaagaccattgcctggaaccagagcccttctgtgttccatctaccttcagtgacagagtcttcctcatcaacaaggagctgaatgatccagctccaaaatgccactattgtctcacttaatttctcagaccacttccagtgctatcacaggctaggatctctggaagcagagactgagatagagtttggagaatcagatgtgtagcaggggtcaacccaagtgaaggaaataaggaggaaatgggattgaacagagaagttgacttagatgcaggcttgacaaagatttggccaactcaccaaggagttctaatgctaacactgactatcacagtgctccatgttgaacaaaagtagtcagacctttataaccctgcctcactctgtcagcaggtgcaggctgacccaggaaaggtatgacttcaggcaaaatgatctctatagattgaagctgaccctgaaggagctaagagctacagactatctcagaccacactctctgctgctggacatcataatcttcttaaggacgttttgaatggtacaactccctatccaccacagttagtaacttgcctgttccacactgttagaaggtagtagaggcaggccttgaagccagctagccttggtccaggatccgtgcttgtcaccatctcaatacagtatctaacagctattggtagtgtggacccacttgacaactttaacaaagtgacatgaataaatctgatccttagattctctaggaggtattgttaaatatcaatatcttgagattctttctattcctaaggttttattagactcatcctccccacctgtaaaaaggcctctgccatccgtgaggtaacattctttcctctattgaaataaaccccagcgtgttcagtttctctgcagaaggagtagcctttatgaggaagggacccccactgtattgccttgagtttcgtatttccttatgattctctcacttgatcttcactgttaacagaacattttcctttttaagttatcccttagaaattctgggattcatttcaacatagaagtacataatttctgaagacattcatgaacatgactatttgacaagaaaggtgaaagacaattgttgatttcttcatctcaacagtgcctcaaaatttcccttttaaaaatccattttaagggagtttatactatgggtagaaaatagtaaaaatgttttaataaaaccagtaattcaatcacttaatttattgttactctgaattggtattcttgcttaaagtaaatgcacaataaatatttcttgaatgaatgaatgagtcattatcatctctacgcatcatgtattttgaattatctttccagtcatggaaatagatagctcagagaatctgaatattgttaccagtcaatcatagtgtcaagaaataaagccaagaaagtcttactttcttagatcccaagcctccttaattttttttctatgcttctatattcatttaacctgtgtctaaatttcttaagtgctttgcaataacttttttctccatgtttaaggggaaaacagaggaaagagcagtgcaaaactgtgattatctctctttagttctgccttgggttacagctatgagctctttgtgaactgagtcccaacaagaagaagggagcactctaaaattatgacaattccagcagaatttaagggttattattttttctcttttctttctttcttgaacttctgggctcaagtgatcctcttgcctcagcctcccaaagtgctgggattaaaggtataagccattgagctcagctttaaggattatttttaaaggtctagggatagtgtagaagagccacagggatagtactcagtttagtgacagctcagctgtcttatactcttagacctgaagaggtgaagtgaagagaaggtgcttccagaacccacagggaggggttatatagagagctgcctgctagaagctaagactttttgtgaagagacacagccagcccttggtgactctactgggagggagatggagtaataaaacatacagcctcactcctctgcttccctccaatctgttgctggggcttccctatgccaaacccacctggaaactagggagcgagagaagctattgatgaagtcagtatatatcagcctcccaaggcaagggagagatgaagaaggagagtgggtattcacaggacaaatagaggatgttcagcacacttttctcctatcagccaaaataccttgggaaccctgcaaaatgtgtaatggaaaaacgtggatttggagtaagataaacctgagtttccttcttatttctggcactgcctagttggttggcaatgagtaagttatacagtcatctccaggtcataatttcctcatcagaaacaagaaaatgtggtagactgttttattgtctccaagcatttgctgacccctttcctagatgaggatgcacttatccacccactgtcatgtcccgtgtggatgaaggatacttctctggcacggtgatgttaagcttgcccatgcaacttgcttagcccaatggaatgagaggcagaaaccatgcctgcaaagaagcctttaagagtaattgtatatttcttgttgttctcttgctgtctttcttctgctatgagaatagcagaatatccaaactggggtgtctcattcagctagctcctagaataagaagacacagggagcaggaacatggcaactgacctgcagatgctaacatgtaacaagagtgataagtaaatgttttggccaccaagacaaatacaggagataatacatttacaaacccaagagataacctcaaaaggatattgaagcaacacaatgtggaaacaagtaggatgatgtataatggacgggaaatgataattatatgtttgttctgttcaccccatttttccaaccctcaactaattcactggtgcatttagaagtatactgtccaatagtgatagtcactagccaaatgtggctattcagcactgttaagcactggtgagccatatggtgtctgttagagcaactcaactctgccattgtaacctgaaagcagccgtaagtagatgtgcatggctgtgttccaataaattttatttacaaaaacaggcaactggctagtccctgcatttattgatcaaaggaaagagcaatagctttgaagcagagagacgagtctatgtcccagctctgacattcaagagtagcctgggacaagttacttatcctctttgaccaaatttttacctcccagagttaatgaaccacataggtaaagggatcaagtacagactagccactcagtaaacagaagttcctgtcctttctacacattaccaaagaaaatatggaaattgcattagtgaatttggctcaaacattttgatctgttttcaaagtgggtcaaaaggccttcagggaaaatttggagaatatattgtctaaataaattcaatggagaaagataccacataaaagtgcaggagttttaatttttaaaatgagttacctactatcttgagcagagtttagtagattacaacagactgtattattattgccagcaggggactatctaattggaagttcatcatctacaataaaaaaacacaggtggaaccctatcagtttgtggtgaacaagaaaagagtatgcaagatgggtggggaggaataagactatttgcacctagagagaaagatacaaaaagtaaaaaggcatggctccaaaggaactctcagcatcaattttcaaaatttaatttaaaacccagagctttccaaaagtatgttgtaatttactcaaaatcctccacctccatctcctctctgccaatagtcgtagggtttcaacagactcaaaataaattatcatcagaaaaaagaaaaatggcagacacctttggtgtcatgctgaccagcacctttctctccaagatagccattattatatccttcagaaaaatttccccaccacccaaggctggatcaagcctccctcctacatgttctggcttatagatactgtcttatccatatagcaggacagcatggcctttttattctgtctcttcctgaagagaaggcctctgtgtgctattattaaagttatggtcacagtgcctccttagtataacaatgcccagaaagtgttcagtaaatatttgctaaatgaagaaataagtgaatgtgaactagagtagtactttttattgtcatttaggatgtttccatcttccttcattcctcagtaacaagcaatttgtcaccctctcgaacttaatctctctaatccccattttcttgatctataaaatattgcactttcttgctgaggtttaagttgtaagatatatgtcaagaacctatcagaatctgagattttgtattcattcaacacgtatttgttcttttccccctttttatgtcaatcatttcttattgaaatatttgcctgcaggtagatttggttttgaaatcttctccctgaatcatttacaacactgtgaagcaatctacctttaaataatagtgaaccattgttttctttagcttgcattgaagttgaaagactatttccttccttgcattctagacaagccccaaattaagtctgctttacctgaaattacacacgaaaaccaatgttgtgcctttgaaatgcattgctttcttaatcaaagaactcaaaaccttattgcttctaactcatgtcagggttgtatgtacacaaagtataagagccacacattatcaataacaatccttacaactacataaatctgaatttacaacagacaccggagccagatttttggtgttcaaattctatctactgtgattagtctgcacacctgtaaagtggggagaaaaataataagtgaaccatgattacaccactacactccagcctgtgcagtagagcgagaccctgtctctaaaaataataataataataatgataataataataataataatattcagaccatggggttattgtaatgacaaaattcattaatatatgtaaatcacttacagaaatgccaaacacacagtagctaccatgtttgtgttaactgttgttattcttttcatatggatcactgtgaagaaatactagatgtctccaaaatgtgggtttatgatgacaagaacacattgataaacttttgcatttcacagtgctttcatactgcaaactttcaccaggaaaatttcatttaatccttaccattcatggcacatttggagaaattgggctgagagcagttaaattagttttcaaggccacataacacgtaagtgacagatacagggtaacagaaacagaaaaacacaaatcatctgactccaagttcagtgtttatctaccacaccaaagttattcataaacacatagacaaaggttggaatacaaacccaagccacaatctgactacagtgagataattcacaacctttttcgtgttggcttgatattctcttatattacttaatttctagatgttggaccctgtctgcacaagcattgcacaatccactcatctcaacacttcatttgaccaatgaatgtgtacatcaatccactcagctcaaacattttgacatcagcatgtgtaaattgcagaaacatactaattttaatatggatcagaatgaggtggcacacctttgagacatttgtcattctctggttcagcaacagttaccaatattacagtgcctaaattcacatttgatctcagatcttctcaaacactagtgttgatatatttgttttctatttttattatactatggtatttttctggaaatatttaattactaattaaggagaaataattttaaaaagtgtattgcaagcatttgtaaagatgtgttggtatatagatttcatatgaactttgggatcctctatgactgtacagcttcatctcttatggcttttctttcattttttattaactgaataccatgtatgatcttttctgataggaactagtgatttgccatgaaataaggatgtgttgattgtgccagacttcaataaaacactttcagtcatagtatattaatagataccattgcatctttccacattttggggagagatatttctctttattctttgaagtgtgttaaatgctggagtgacatgcaggtctgttgttaaccggcaatcatttgtatattagagttaccacttaaaactgagacagcatcatcaggcagactgataacatcaatgaagggctattaagcctcattatatggtgatgagctgttgctaattgatgaacacagatatgtcctacactgggaatgtggagagcctcatccaacctcctgcaagaatcagaagcagccaatgcattttgatgcaatattcaaatcccctcctccagaggagatataatccccagagatgaaataattatatgaatattcttagtccaaatgatctcttccccactgtcattgctttttatcatgtatgcatttcaattttcttctttatttacactttacctttcttgcctttttagttaacaagttatacttgagtcataacatttcctgatgtggcatggactatctccatgtcagtgacttagaaatctttatatttagccttcactttccccccatcatcccagctgtttaatatacacccactgactctctcctcttagggactcacaagtaccctactgttaaaaacagaaatactttctctcaactcatccaaatttgcttttttccccccaatttttctccccaaataaatttcagagccatccttggttctttccttttacctaagcccctctcaaactacaaactgtcaagcttctccctgacatgttattcaaatctctgtgtttctattatatctccattgctaacggttttctctaagccttccatgtctttttttttaacttgtccagtagctgtttcctttatcttcccacatcctaccacttccttttccaaataattccccaaactgtctttctaaaacaaagaattgataatgtcatttttttttctcttcctaaatagcctttctcctcttccttcctagtgaatgccccctcatttttcaagaccgaagtcaactgttccattttctcttcatcctttctgggcttcttcaggtagatttagtctttctgttttgaatttcaatggcccttttaaaaacatatattacagcaatcatcacttcctttgtatattgaaatgaccaagggaaaactgaataattcagaaatgcaccaatgtcacagtatttgaacattttttttccaggatctcatattcagaccacaactttgtgggtcttgctgagtattgaaatctccattgttaatcatcaatataatgcaagttcatgacaacacagaattagtctttgtaaatgttcccggaccaaactgagattcgggctgctatgtctcatggcccaataatgagatgcagatgaactggagaaagagagttttttatttctgtagccatttgcagggagaaggcctggaaattattgccagaccaactcaaaattacaaagatttccagagcttggacttctgggttggtggggacttggagaacttttctgtcttacaagaggattgtaaaatgcaccaatcagcaatctgtagctaggattgtaaaatgcagcaatcagtgctctgtggctagctagaggtttgtaaaatggaccaatcagcactctgtaaaatggaccaatcagcactctgtaaaatggaccagtcagtgctctgtaaaatggatcaatcagaaggatgtgggcatggacaaataagggaataacagctggccacctagccagcagcggcaacccacttgggtccccttccacactaaggaagctttgttcttttgctcctcccaataaatcttgctgctgctcactctttgggtctgagccacctttaagaactgtaacattcaccacgaaggtccacagcttcattcttgaagtcagtgagaccacgaacccaccggaaggaacaaactccagatacgtcttcagggctcatccagaataccaccacgtggtgagtatcatcggaccccttttgcttgctattctgtcctatttttccttagaatttgggggctaaacacagggcaactgctgatcagttaaaagtgactagcgcggctgctggactaaagacatgggtgtcaggatttctttgaaagggctctctaacaacccctaactctttggagttgggagtgttggtttgcctggaaccagcttccacttttcctgtacgtccaggctgagccaagggtcaacagagaggaaagccattcacttctggggtcctgacaaaaagttggttgaccctgcatccataagcggaactctcaaagtcacgttgcccaagcaagactcacccatctatcctatctatcctgacccttgtctcctgggtcttaatgcctgtgagaccaacttaccctcatcccccttctccaaggctagtcttgcttctacaaaccactccctgcctctggtgcttttctagtttctcctataagagtgatttctactataagttttgggactctgttccattctttaggcacccagaatcaccaatcagacagacataatttttgcccaaagccccattgtcgggggactatctggaattttaggatccctcctcagacaagcaggcctaacaaaggctattcctgaagctaggatatggggagcctcagaaatgatatccttcttattcatatgatgagaagtgaggacaaaaagcgtcactcttccaaccctggagatccctttcctccctcagggtatggacctccactccattttgaggcataacatctttatacgacaaggataaagtcccaatactaacagaaaaaaatactaactttataggacaaggataaggtcccaatactaacaggaaaaatgcttaggactctaacagatttttgagaatgcatcagtaagggccactaaatccgattttcctcagtcctctttgtggtctaagaagaaaggcaagggtgcaggtttttgagaatgcattggaaagggccactaaatctgagcttccttggtcccctttgtggtctaagaggaaaactagtgtttctgcttctgtgtcggtgagggcaactattctgataagcagggtccagggaccatagcaggttcttgggcaagaggggatctgttgctgcatcggtgagcacaactattctgctcagcagggtccagggaccattgtgggttcttgggtggggcacaggggggcaacaaacaaaccaaaaccacaggaagttttttctttcagatgggaaacactcaggcatcaacaggctcacccttgaaatgcatcctaagccattgggaccaatttgacctgcagaccctgaaaaagagatggctcatttttttctgcactatggcctggccccaatattctctctctgatggagaagaatggccacctgagggaagtataaattacaatactatactgcagcttgaccttttctgtaacagggaaggcaaatggagtaaaataccttatgtccaagctttcttttcactgaaggataatccacaactatgcaaagcttgcaatttatatcccacaggaggacctctcagcttacctccatatcctagccttcctatagctccccttcctattaatgataagcctcctctaatctcccccacccagaaggaaacaagcaaagaaatctccaaaggaccacaaaaaaccccagctatcggttatgtctccttcaagctgtagggtaggggaacttggcccaacctggatacacatccccttcaccctctctgatttcaagcagatcaaggtagaactggggaagttttcagatgatcctggtaggtatatagatgtcctacagggtctagggcaaactttcaacctcgattggagagatgtcatgctattgttaggtcaaacactggcctttaatgaaaagaatgtggctttagctgcagcccgagagtttggagatacctggtatcttagtcaggtaaatgatagaatgacagccaaagaaagggaaaaattccctacaggtcagcaagccatccccagtatggatccctgctgggacctcgactcagatcatggggactggagatgcaaacatctgttgacctgtgttctagaaggactaaggagaattaggaaaaagcccatgaattattcattgatgtccaccataactcagggaaaggaagaaaatccttctgccttccctgagcagctacaggaggccttaagaaaatatactcccttgtcacctgactccctcaaaggtcaattgatcctaaaagataagtttattaccaaatcagacacagatataaggagaaagctccaaaagcgagccctgagccctgaacaaatctggaggcattattaaacctggcaacatcgatgttctataatagcgaccaataggaacagaccaaaaaagaaaagcaaaatcagagaaaggccacagccttaggcatggccctcagacaaacaaaccttggtggttcagagaggacagaaaatggagcaggccaatcacctggtagggcttgttatcagtgtggtttgcaaggacattttaaagaagattgtccctgtaatcccagctatttgggaggtcgaggcaggcagatcaagaggtcaggagattgagaccatcctggctaacatggtgaaaccccgtctctactgaaaatacaaaaaaaaaaaaaattagctgggtgtggtggcaggcgcctgtagtcccagctacttgggaggctgaggcaggagaacagcatgaagccgggaggcagagcttgcagtgagccaagatcacaccactgcactccagcctgggccacagagcaagattccatctcaaaaaaaagaaaaagattgtccaatgaaaaacaagctgccctctcacccatgtccactatgccgaggcaatcactggaaggcacagtgccccagaggacaaaggttctctgggccagaagcccccaaccagatgatccaaaaacaggactgagggttcccggggtaagcatcagctcaggtcatcatcctcactgagccccgggtacatttaaccattgagggccaggaaattgacttcctcctggacgctggtgtggccttctcagtgctaatctcttgccccagacggatgtcctcaaggtctgttaccatccgaggagtcctggaacagcctgtaaccaggtatttgtcccacctcctcagttgtaattgggagactttgctgttttcacattccttccttgttatgcctgaaagtcccacacccttattagagagggacatattagccaaagctggagttattatctatatgaatatggggaacaagttacccatttgttgtctcctacttgaagatggaatcaaccctgaagtctggacattggaaagaattcggaggggtaaaaaatgcctgcccagtccaaatcaggctaaaataccccaccacttttccttatcaaaggcaatatcccttaaggcctgaagctcataaaggattacaggatattgttagacatttaaaagctcaaggcttagtaagaaaatgcaacagtccctgcaacaccacaattctaggagtacaaaaaccgaatggtcagtggagactagtacaagatcttagactcatcaatgaggcagtacccaacccctatagcctgctgtctcaaataccagaggaagcagaatggttcatggttctggacctcaagtatgacttcttctgtattctcctgcactctgactcccagtttctctttgcttttgaggatcccacagaccacacatcccaacttacatggatggtcttgctccaaaggtttagagacagccatcatctgtttgttcaggcactggctcaagatctaggccacttctcaaatccaggcactctggtgcctcagtatgtggatgatttacttttggctaccggttcggaagcctcatgccagcaggctactctagatctcttgagctttctagctaatcaagggtacaaggcatctaaatggaaggcccagctctgcctacaacaggtcaaatatctaggcctaatcttagccagaggaaccagggccctcagcaaggagtgaaaagagcctatactggcttatcctcaccctaaggctttaaaacagttgtgggggttccttgggatcaccggcttttgcctattatggatccccagatacagcaagatggccaggccactctatactgtattcaaggaaacccagagggcaactactcatctagtagaatgggaaccagtggcagaaacagccttcaaaaccttaaagcaggccctagtacaagcgccagccttaagctttcccacaggacaaaacttctcttatttgtcatagagagagcaggagtagctcttggagtccttactcagacttgtgggacaaccccacaaccagtggcatatctaagtaaggaaattgatacagtagaaaaggctggcctcactgtttacaggtagttgtggcagtggccatcttagatcagaggctatcaaaataatacaaggaaagaatcccaccgtctggactgctcgtatgtaaatggcacactagatgctaaaggaagtttatggctgtcagacaactgcctgcttaaatactaggcactacttgagggattgttgcttcaaatacacatgcatctggccctcaaccctgatacttttctcccaaaggatagggaaccaatcgagcatgactgacaacaaattataatccagacttatgctgcctaggaggatctcttagaaatccccttagctaatcctgacctccaccgatatactgatggaagttcatttgtggaaaatgggatacaaaaggcaggttatgccacagttagtgatgtaacagtatttgaaagtaagcctcttcccccagggaccagcgccgagttagcagaactagtggcacttacccgagccttagaactgggaaagggaaaaagaataaatgtgtatacagatagcaagtatgcttatataatcctatatgcccatgctgcaatatagaaataaaaagagctcctaacctcgggggaacccccattaaataccacaaggaaatcatggaattattgcatgcagtgcaaaaccccaaggaggtggcagtcttacactgccaaagccatcaaaaaggtgaagaagagaaggcagaaggaaactgtcaggcagatgctgaggccaaaattgctgccaggtggaacctcccattagcaatacccgtggaaagacccttggtatggaacaatcccctccaagagattaagccccagtattccctgactgaaacagaatggggactttcacagggtcatagttttcttccctcagggtggttaacgacagaagaaggaaaggtactcatacccgaagccagccagtggaaaatgcttaaaaccctccaccaaacttttcataggggtattgagaacactcatcaaatggccaaatccctatttacagggccaaatctcctctggaccatccgacagatagtcaaagcctgtgaggtgtgccaaaggaataatcccttggtccatcataaggcccttctgggggaacaaagaatgggtcactatcctggagaggactgacagttagacatcacccatatgcctaagtcaaagggatttcaatacttgttggtctgtgttgatacctttacaaattgaatagaaggcttcccctgcaagacagagagggctcaagaaatggttaaagtcctagttcatgaaataattgctaggtttaggcttccccaaagcttacaaaatgactatggtcctgcttttaaagccacgataactcagagaatttccagggcactagggatacaatatcaccttcactgcacctagaggccacaatcctcagggaaggttgagatggcaaatgaaacactcaagaggcacttaaagaaactaacacaagaatctcaactcccatggcctactctcttgcccatggccttgttgagaatccaaaattctcctcacaaaatggggctcagtccatatgaaatgctgtatggatgaccttttctcacaaatgacctcctgcttgatcaggaaaaggccaacttcgtcaaagatataactcctttggcaaaatatcaatgaaaccttaaaaacctacccaaagattttcacagagaagagaatggagttgtttcaaccatgagtcctagtgttggtcaaatccctcccttttacctccccatctatggattctttgtgggaagaaccatactcagtaatcctctctacccccactgcagttaaggtggcaggagtggaatcttggattcaccagacccgagttaaagtttggacaccccctgaggaacctgtgggaccatcatctcaggagtcccaagatcagccagaccaaccttgatacacctgcgaacaattggaggacttgagtctcctatttcggaaggaaacatcccagactaaaaaggctcctaccaatgatcctgaagaaaaaccctttcctccttaaaaaagataagggaaaacctacataatctttaacacctctccttccccctttaatggaatccatttactagttcatcatattattaagcagcatactaatcatactctttgcaataggactatatactgtagctcttgccaggacgaaaatcctaatcacatcaaccttctttctatcatccttccttctgacagcaatttactcctgcctttaacagactggataaaatgattttatcttccaaggtaccctctttcctttcctacttactctttgcctatctatccctcctgctaccttggatactccacacaatcgcccctacccttccactagctcctaattacctctacaagtcttgcagactttaaactgtcttatttttcttattaaactagaacccatagagtgaacttttctcaatttgcttatgacaggtcatctacttctgataactgttcactaattttgactttgcccctatctcacattcctgtttcttgtttcatttttttttttcataactaactaaggacctatatcctaagtaccaaaagagaacagtcccccttacattctaacattctggctaagggtgaattagggctttacctttgttgagccacgttggcagaatatattgagaatctttgacatctgtttaattcagtatctggtacatgttaggagtagacactaaatatgaatttatcagatttccaaacatactacctttggaaaaagttagtcttgggtctatgaagaaatgaagttggagataaataagccttagatgtgagttcaggagagattttctcacttctatgagccagggctcaatataacctggattctgagccaaagagagtcctagaccagatcaaatagaggtgttaagccttggataaacatatcagaaagacatagtaaacaggcctaggaagtatttcaggctctgtacttgtataataattctatatgttgtatggcctttccattatccaagactattcagtaaagtgttattaacagttgcagcctgactataatgatacgcagaaaattagaaaagtactatgcccacgtggggtaaagtgatacaaaaggaagcaatttcccctttcttgagtagtcctccttcttcctagagtagagaagggtgaaggcaggtggtagctatcattaacagaggacagctacatctgaagaagaaaggaagaaaaagagagagattttaacttgtaccattgatatggtttgactttgtccccactcaaatctcatcttgaattgtagcacccataattcccacatgtgggagggaccaggtgggggataattgagtttccccccatactgttctctcaggagtaaataagtctcacaagatctgatggttttataaggggtttcccctttcacttggctctcattctctcttgcctgctgccatgtaagacgtgtcttttgccttccaccatgattgtgaggtctcccagccacgtggaactgtgagtccattaaacctctttttctttataaattacccagtcttgagtatgcctttatcagcagcatgaaaacagactaatacaactattataatttgaatacaaaaaagaactatgatcttattttgtagtcaaaggcaggtgaagtctagaatattggagttcatgtacttccttttcaacgttttctactgtactacaagtttctccagagaaagaatcatgacatttttatctcagtactcctggtgtcaacattattcttgccatgatatgtaagtgtttaagtgtttaataaatgctcattcagtcaatgagagagaaataaagcaggaaagtttttaaaggtagtttaatcctttaattcattttgacatgtatttattattttcctaaaacatgaaatatatttttaccaagaacttgaaagtacaactatgaataaggtatgattcttgctaacaacttacagcttagtgaaggagacattgatgcaactaactctaatatgaaacatgtgcaaacagaacactttcttatgagtgtcagaggaggcattttggagaaaatgtgggcctgacagtcaaataggatcatgacctctggagaagaacagggtataaaaagtgagagtatttcctaggaataataatgtggaggccaagatgggctgacaccccaaatcattcattcaatcattcagtcatctatttaacagacgtttactaaatatttaatatgtgaagcactcatgaaacagatcattatgatgaggaaaagaggtatatcaagatattcattttctaatgaagaataagaggggaatgcccagtgaaaggagacattttgggcatttctaggcttagacaaggcattctgagggcttctatgcagcatgtcttctttctcagagaacaagaggaggctacctgcattggggaaaaccagggaaggtcttgatatggcatttccagtgccagacggcagggcctggaatggatcataaagggccagaacagggtatggagatcctaaaaagtataggaatggtttagggatgtatttgagaaatggttacacttcagggtagaaaatcaaaccaaaaaaatcaaggtgagcagtaagccaaagggcagaggtaacactaagctgaggtctaggaattcaagcccaaagcactaggtaaggtttagaagaggtaagttattagctgggtttaaagactgactataggccgggcccagtggctcacacctgtaatcccagcattttgggagaccagagtgagcagatcacttgaggtcaggagtttgagaccctggccaacttagtgaaaccctgtctctactaaaaatacaaaaattagccgggtgtagtggtgtgcacctgtagtcccagctactcaggaggctgaggcaggagaatcgcttgaacccaggcggcagaggttgcagtgagccaagatggcaccactgcactccaccctgggtgacagagtgagacactgtctcaaaaaataaataaataaataaaataaagactcactataatttatagaggcaatccacacagttcctcctccagaagggcattatggcttatgttagagggtggaagcaaaaggggaccaaaaaaaggaatagaaggagttggaggagttggtgaaaagctgaaatgaccatcagtaatctgtaagaaaacttcagttggcttccatccctgtgttagaatttcaagggaagacccattttcattggtatgataatgacatgaatatagtttgtaaattctggagtggataaatttattgtttaagccagaaccaagataattataagggtattgtccaaataagagtaagacataatctccagaaaatgaatcttggattaaaaataggggagaaagatcatcatctaataattcgtgtacacagcagagattcacttcaaataaacaatgtactaggagaacagagaaaccttagatgtccaaatacatggaagcgggagagacttgttccctgaaaatatagaataaaaaatgggtccctgtttcattacagaagtgttggcatgactgttgttgccataagcattaatatctactcctggctgggctcaatggctctcgcctgtaatcccagcactttcggaggcagaggcgggtggatcatttgaggtcaggagctctagaccagcctggccaacatggcgaaaccctgtctgtactaaaaatacaaaaattagctgggtgtgatggttcatgcctctaatcccagctacttaggaggctgagccaagagaatcacttgaacccgggaggcggaggttgcagtgagccgagatcgcaccactgcactccagcctaagtgacagagtgagaacctgtctcaaaaaaaaagaaaaaaaaaaaaactactcccaatggtttaggtaagcaagtaccctaaatgctgatccaatgacattttatcttattttataattttatcttacaattaccttacttaatacatctttatgcttttatctcactcactaaattaatggtttttaatccccagtgtatattaaacaacctggaaatttttattttaaataaatattttagagctctaccaagaaattgtgatttaattgttctaggttacaccttggatgccagtattttcaaatctcccagttaattctaatgtgcattctgagttgcaatttccacagcacattaaaatatcatcaactacaaaacagggtcccaatggtttatttggattggtagaaaaatctaaagttgagattcagaatcattgcttattaaagattactttggaatgaaagtaaagatattcaaaaatgttctaaaatattcgtccacgagtatagaaggcttctgaatcaaaatatctgagaataatcattacctgtcttcttcctcaaaatccaaaagaaatgatgggagttataaatacataacagtccaaggaaaccgcgaagcatcctattccacatatcaaaataatgaggaatttctggaagataaaaagtagatatgacaaagaaactgacactcagtacatgcttgagatgtgactaatgaaaaagtaagttttcccccttaaaactctggaataacaaatgatgagaggcagcaggaaatagaagcaagagccagaagtagaaaattcagcaagtaattaattaaagactgcaaaatagctactctgtctctggctcgcagagcatctggcaacatgggatgctagaagtgctgaaaaaggatgggaatagatatttttcatataaagagaatgttaaaatgtacaaactcagtttaagaataagtgaatacccatgtgaccatgactccagttaagaatagaacattgctagtacattaaaatgcctcttttggataacaacttctttttcccctaaaagtaactactaggccaggcactgtggctcacgcctgtaatcccagcactttgagaggcctaggtgggtggatcacgaggtcaggagatcgagaccatcctggctaacacggtgaaaccccgtctctactaaaaaaaaaaatacaaaaaaattagccgggcatggtggcgggctcctgtagtcccagctactcgggaggctgaggcaggaaaatggcgtgaacctgggaggcggagcttgcagtgagccaacatcgagccactgcactccagcctgggtgacagagcaagactccgtctcaaaaaaaaaaaaaaaaaaaaaaaaaaagtaaccttctatgatcacaactataaacattatttggttttttctcttttgggactttgatatacatggaatcatagtgtatctactcttttgtgattgcttttctcgctcaactatacatttgtaagtttcaaacttgttgatgtatgtacctgcaattcattccttttcactgatagataataatctagtttataaatatacaaccattttttaaccaattcctgttgaagagtatttagattgcttccatttttttaaatttgatgaacagtactgctataaatatttttgtaaaaaagcttgatgcacatgtgtaaacaattccctttgttatacacatcggagtaatatattcatatgctcaactttcttagggcatgccaacctattttcaaaatacttgtaccaatttacactcccaccagatgtatatgtgagattctgttgctttgcatttcttgccatcatttgagtcattaaagttttttttttttttttgagacggagtcttgttctgtcacccaggctgaagtgcagtggtgcgatctttgctcactgcaacctatgcctcccaggttcaagtgattctcctgcctcaacctcccaagtagctgggattacaggcgtgcaccatgagttttgccatgttggccaggctgatgttgaactcctgatttcaagtgatccgcctgcctcagccttccaacgtgctaggattacaggcatgacccaccacacctggtcttgaatcattaaagtttaaagcttaatcttgcgtttatgtaaaattatctcatcatggctttcatctgaatttatttgattacaaatgatagaaactttttgtagtttataagtcatttgggttgccttttttgtgaatttttttattcaaacttttaccatattgagctgcccatatttttcttacttgtttacaatatttcattaagttattaattctaaaactattgggcactttctatgttccaggccctgttctagacacttgagctacatcattagaacacacacaaaatacacatatccctaagtaaatattctctgctcttagacaccttctagtgttgaaagtgaaaggggaaataggcaataaaaatacaaaggtaaactatgttgtattttataagttaataagttctatcagttaaaaaaagaaaaaaattaaacaaggtaaggggtgttagattgctggtgctgcatgggaatggagcaaattacaatgtaaaatattataagaataagccttatgaagatacatatgagagagtgagtacatgaatatgcaaagttgaaggcttcatcatcctgggtcctacagtcactgtgctgattagagatcccttactgacctgcactgggtataaaatatgagcaaagaagtttattttgtcaagctattgagatctgcaggttgctctttactaggtcatcacctggctcatcctacctgaggcagttacagtaagacatgcaaataaaaagactattgtgatattcttggagcgtggaattctttaagcaaaggagacaacccagaaattgtaaaagaagggaacaaatttgattacataaaaactaaaagctctctgtaggaaacctaccatggaaaaaggataatagatacataatactttgttgaaaaaatgatgatttatagacaaggaatagacatccataatgtacaaagagttcttaagaataagtaacaaataaaaattaattctagaaacatagacaaggaatatggataaagcattaatatagaagatctgtgttacataacatagaagaatattcacaatactttagaaacacacacacacacatattccatacctttttaaaagtacacatatataacatataaaatggaaacacacacatatatgtgtgtgtgcgtgtatacatacacatacgatatatattttatttgtatgtgtaaataaaaagttatggataacatataataatatattaactattagagtttgagaacttttttatcaactgcaagttctttaattttacaaaacagttaaaaatgtcagagtatggttatgtttggtaaattccagttagcaatcgaaaattatgtaattttggttatactgccctataaatatcaattaggtcaagttggctaattatattgttcacagtctctttatgctgattgatctccctgttaatgtaagttattgagagggaaatattaaaatctcaaacaattattgcagattcacctgttccttttttgggttctgtcttcttttctttacatattttgaagctatgttattaaggaaaatacatttaagatttttttaattattttttcttttttgctgttcttcatgaactgtagattaaagatggttatatcttcctgtgaaaaagagattttatcataaaatacccttatttttctctcataacacttgttgtttagatgtactttgtctgatactattacagtcatatcagtattcttttgcgtagtatttattatacatagcatatcttttccatttttttatttttaacctatatgtatgtttatttcaagtgtgttccttgtaaacagcgtatagttggagcttttaaaaaaatttagtcagctgggcatggtggctcatgcctgtaatcccagcactttgggaggccgagatgggcagatcaccaggtcaggggatcaagacatcctggctaacacggtgaaaccccgtctctactaaaaatacaaaaaaattaggtgggcatggtggtgggcacctgtagtcccagctacttgggaggctgacgcaggagaatggcatgaacctgggagacggagtttgcagtgagccgagatcccaccactgcactccagcctgggctacagagcgaggctccatctcaaaaaaaaaaaaaaatttactcaaacagatttgactttgaacaagtatgcaacatcattggtcagtatgaaaatgcattgcaaaaccataattaaatgcctccttaaatccagcaaaatcgttaaaatttaaaagaatgacaatagcaagttttgcaagaatatagatgaactagaattcttatacattattagtaggagtgttaattggttaataaagccactttggaaaatgttttagcagtatatactaccaaacttgaacacatggggctctaagacacagtaattctactcctaagtatatacccaacagaaattagatgagtgtatagtccaacataagacatgcacaaagtattcatagcatcttcaataatcacagacaaaaactgaaaattaaccaaatgtctatcaataggaatattgataactaaactttggtgcactcatgcagtgatatacacacagcaatataaaagaactgatatgcaggaaaacatgaataaatcacattgacataatgttgagtgaaaaaatctagacaaaaaggtgtatatactgtttgattcaaattatataaagtttaataagaggcaaaattaaccttggatgacagataccagaccatggttacttctgggagaggatgattggtaataagattgattggcatgaggaaaccctctgatgtgctgaaaatgttctgtcttgacctgagtagtggtttcatgggtatatacaaatataaaatgtcaacaatctgtacacctgagatttgtacattctatgtaagctatacctaaattaaaaaaagaaaataaaataaatatccagtttttcatatttagaaaaatccaaaaatcagtttatatgaaaccgacttaacatacaccattttgggtttatgttatctttccataacctaatgttggttaaaatgaggtgctttcctatagtcctgttcagcagtgcatacatattttgggtgttactgtttctaagtttttgagctgtgaaactgatccttagtcttcatgaagggttgtgctgaagacacaatgaggagatatgaagggaaacataaaagtgtccagctctgaattttattgctctttcccctccagataaataatttgcctagataaatgatttattaagaataatcattttcttttatgaccttacccaggtatttctgttgatgttgagatggctgactaatgacatttttggaagcattttcatcattcaagaaagtagtggttatattcatgctagtgaaatgtgctaatgttttctcttcaaaagcacaacacattttgtccctttgaaaagatcaattgaagtttctttaaaagctcagctaaatacacaccaccctgtgaaagatcacctctagtagaaagtagacagctggaatctctgggacaattaagtagatgagatgtgagaacagaggtgctgttttaatggttttgtgactgattctaagctcaatggaattattatgccaacttttcctcttgtcttgctttgatgtggtagtggatacttttgagaatgaatattggcaataatcctcctggcagcatataagcaacttagcgtagtttcaagagtaccagttctaggttgctcaggctcaaatcctgtgatcaccaggtctatgctgggagtccagaggcaagttactccatctctctgagctcagtttcctcatctgcaaaagtgggtatatcagtacattccacacagcttgttgtgaagattaaacagaatcatttatgtgaaagcatttcaggaaaaaatgagggaatttttttttttttttttagacagagtctcactctgttgcccaggctggagtgcagtggtgcaatctcagctcattgcaacctccgcctcctgggttcaagcaattctcctgcctcagcctcccaagtagttgggattacaggcatgtgccaccacatccggctaatttttttgtacttttagagagatggggtttcagcatattggcccgtctggtctcaaactcctgaccttgtgatctgcctgcttctgcctcccaaagtgctgggattacaggtgtgagccactgcacccagctgaaaatttgtttatactaatcatgcccagaaagaagcatgaaagatgtataatccagctggaactgagaaggtatatagtagattttatagtaatgatttcaagagacaatccattaaattgatttaaatagtacttgatggataatacttgataataacattagctctctttatgttaatttttagcactttgaaaaaatgtgcatatttaaaatctagacataccttaattcttgtgaacattcagaacagacattaattggcttttaatctctgttatgcattgatgacaaagcattagagtgggaacttggaaattactggtcaaaggtgatgaggaacaagtggctcttttcttcctttcattcagttcatgtgggttctctttaaaacccgtgctctacacaatcagaccacagtattccctatttcccacatggcaggatgggtgaagattggaacttctatagtcctccatattattccctcttccacattattaaacttttttcaattaggcttcaagttccttcagatagattataagtgagccctctggattcaaaggaagctccctcgttacctagagcccaggtattccggcttctcaggtaaccagaaattaatcttttcatcatctctctatggagagtgacaagtttttagagagttacaaataaatttagcatcttttcagcgattcattttgcattaagaaaaaccacagccactgaataaaaaataaaaaatccttgaggactctacttcattttatgcctagtggcaaatattacaggatcatgcaggcagttagaaatggttcagacctaatttaacttttctgaaaaatggcttgtagcccattgtctacaggatgccaaaacatctgatgacaggtgaacacctcagctggccatctggatagttaataaatgtcaatcatctgggagtgcccaaagagctgaatggaagactgaattttcactttacttccttttttcatatcttttctccatattttgtccttttcactactcttatttcccttcttattcatctataataacagctattgggtgagcagaattttcttccagaatgacatgcctttctctctgccagagtctcatcttccttcctccataggacttaacgttggttgaggattcaagcaagtaataaattgttaataggcttccccacatgtaattgatgttggcattcttccagggctcttcatgtgagtttggggtgtaaatgtagttgtccaacagataaaatgtgtgcaaagctctgaacactcactaaatttcccaaattaataacatctttggtgcttttgatctttatgataaagagagagatgaatatatatttggccatccagtctaccttgaatttgtgttccttatcatcacatcttgctgtctgtaaaactttggcaattttttcttttactttgagtctcctttcgctcaccagtgaaaacaaaataacctgtgagagttgctgtgtggaccaaatgagataccaaaatctgaaaaagtgccttggaaactgttgaaggatttacaattgtacaatattatttactatggtaggaagcatagcatcaggagctgaatacaaagcagagacttaaaagcttagaaagacctcaataacaagaatcatgtcattgtatgattccatgctccagatatcggctgaaatgaagtgattcttacaaacgtttgctaaatgagaaaaaaactttaaaaatctatgaaaaagaagaatatttaaattttagtactgttaacattctaatagattcaatctgttgtataaagtgattgttttcaacctgctaaaagtcaatcattacttatttcttaaggtcttactatacaccaggcccttgactaggactacaacaagtgtaaagaaatcattcaatatcaagtggagagaatttttgtttggggtagtgaattcagcctatgtgtttaattctcttttgtgttcttcacccttagccccttccaatgagtaaattttgtcaacacgacaaagaatgaaaatgttggaaacctacaaaatttttgaaaggaaaactttccaacccccaagtcactggatacagataacttgcctaaggattgtgtgtaataggagactccagaaggaggtcagcaaagcaaccagtctgagtgacatgggctggaggtaaggctggaagtctccctgcctccccaggtagtagtcaagtaatagacactgagcaaacagagattgggaatattgcttacaggttaaatacataattgctcaactaaaaagagaaatggaggtagaaaggagtctactggaagttgtaaatactatgttgaattagatgaccatctagagaattcttagaatgtcctagaactcaaaggcaaataatgaagagattcacataatgataaaaaataaaagagacaaagaggcatgaagaatagatccaagattatatatacacatatatatgtgagtgtatacacacacagagtcctcctctgctctctattttgtgaaataactccacctataataaataccatacccagatgagtacagaatatttctatattctttgaaaatatttttctgtaatgtttaaactatttcagggaactgaaaaaaatgaatttaattaatgagaacaaaaccaaaatcttaaaaagagaactcagaaaaccacacagacctgtctgagatacagatgcaaaaatcctaaattcaaaataaattacttaaaagaataaactgtcaacactattctacttttgtctaatgaacttgtttgttagtttaaaaaaacttacttggattttgattaatattttatttaaatgatagattgatctttggacaacaaatttatttacctgaagtactttctaactttctcaatgctaaaacaatattctcttctttcaactattactactcaaatttgttaatccaaatctcctttggatgagccaccctattttcaaataacgcttaagcttatatactcatttttactgtaatcatttgatgttaatgtgaccattgaggctgcttccagtagacttccacacaccaggagactggaaagttgaactcttaagaggatcactttcaacatcaaatccgtgtctatctacatagagttaactgctgcagtaacgaatccccccttttagtggcttgcagcagcctgtttctttcttgcttatgttaaaggtcgattgtagcttagctgaggcttaatgctgtctttactctggatctcaggtgtatggggcttcaagaatctggacgatggctggtgtactgggctgaatagtgttctttaaaatttcatgtccatctagaacttcagaatgtgatcgtatctggaaataggatctttgcagaattaattagttaagcatattgagataaaatcatcccagatttaaggtgggtcctaaatataatgactcatgtttttatatgaggagaggacacagagacacagaaagtgatgtgaagatggaggtagagattgaaatgatgcatctacaaagcaaagaatgtcaagcactgttaaccaccagaaaccaggagggaggcatggcttctcccttggagcctctggaaagaaccaacacttttaaccccttcactttgtactcttggtcttctaaactataggaggctaaatttctgttgttttaagccacatagtttgtgataatttgttatggcagccttaggaaactcatacagctggtgacttaggcaacgggtaactgagttccagagtgtgtctcactttggctcaacatagaagtgtcctgcttcctttccactcataacttgttagccaaaacgactttcacaaccccacacaaccaaaaaggagtcagaaagtgcaatcctgtcatgtgtcaagaagcagagaaccagaaatatttggcaacagtactaatgactacactgagcccgtggtattacttcgctttcagaggcagaaatgcaggaaaaagtacaatgactatactgaacccactgtattactttgctttcagaggcagaagtgcaggaaaaaatatatctttgcaaatgcattctgatgaaaacagatgacaggcaaatcctattctcttgtgacagacagagagatatttcgccccccaaatctccaaagcggcattccatatattctttctgatagatacatcaaagttgaattctaaaatttctcttaaaatctggcaatgactcaacattagtaagaaaggccttcctcataatcatctaaatggcattttcagaagcaacattaggaaaatattgcctgaattcattctgcagaaattggatttggatattttctttgaaataatttttaagactcctgtctttataagcttcattaagacaagaaaatgaggaggcattttaagagaaaaattactaaattcatagctggagtctgtttctgttagaggtaaataaatcataaagagaaataatgctggtgttttagattcaacttacacaaaacttcaatatatcagccaaatattcccagctttgctaaaagttatactcttttgatagtttgaagaacttagtcttatgcctggttttagaaaagcgggaaaaaagtgtacctcaacttttaaatccagccaggctgtcaccctttgataacagagtattagaaagaataactgagagcattcaaacattttttgagattttcttctttaaattttattctttttaatatactgtgcccaaatggctctctgcctcctgttttatatactatgcagaattaaagtaggtgtttttatttataatattttttatttttatgagtacatagtaggtgtatatatttatggggtacctgagatattttgatacagacacaacaagtaatattcacatcagggtaaatgaggtatctgtctcctcaagcatttatcatttctttgtgttacaaagattccaattttactcttttagttttttaaaatatataataaattattgttgacttttgtcaccttgttttgctatcaaatactgcatcttatttattttacctaactgtattttgtagccattaaccaaccaaccccatgaagtaggtgtttttagattgcaatggaaaattcaatacgtgattacgttaaaaacttgatttacaatccttattgataccttgtcctttttcaatgtaaaataattaacagagaatactatttttagcactatgaattttaaagaatgttatagtgtacctaattttcccttagctatttttggaaaagactcctgaaacaaattccatacagaatgaaatatatagaaaatatgttagcttgtatgagaaatttaacagcctcttgccttcagacatttctaagccactgccccattttcaactcaaccagtcatcaactgtattttatttttagtaacttttaaaatcatgatcatgttgaaccatttagacaaaaataatacgtattaataaaactatattgttaattgtgaagaaatttatgtttggtccaaaaaactgtcattttgtttatgtgtcagtttcttcacatgaaaaactatttgacaaagaacactatggataaaatatcgtaaagaattgttgcctgattcaaatcttcatagagtaatgcagatacccggtgtgtaacagttttgcatgtaatttacctctttatgatgagatgatgtgttcttatagattactgggctgttttggaagccagtgcttagaggtcaatgatgcaagataatctcttgcttcctctgtcctatgagatttttttttaatttttgcaaaaatgatgttcatgagcctaacattgctgcattattattattgtttaatttttaaaatgtgggggtacatagtaggtgtacatatttataaggtatattaaatctaccaattgacccagtaatcccattactgggtatatacccaaagggtataagggtatatacccaaaggaatataaattgttctatcatgaagacaccatgtacacataagttcattgcagcactattcacaatagcaaagacatggaattaacctaaatgcccatcagtgatatactgcataaagaaaatgtgatacatatacaccatggaaggctatgcagcaataaaaaatgatgtgagtatatatatacatatatatatatgtcataatttatgtcacagacagcctgagaccgttcttacagaaacaccccagatcacaattgaattatgtgtatatatatatatgtatgtatgtatatatatatatatatatatatatatatatatatatatatatatatatggcaggaacatggatggagctggaggccattatccttagcaaactaatgcaggaacagaaaaccaaatactgcatgcttttacttataagagggagctaaatgatgagagcacatgaacacataaaggggagctacacacactggggcctattggagagtggaaggtgacaggaggggaggcttaggaaaaataactaatgtatactatgcttaatacctgggtgacaaaataatacataaaacaaactcccatgacacaagtttacctgtataacaaacctgaacatgtatccctgaacttaaaataaaagttaaaacaaaaatgacagtatatatgatactgaacacacttagcaagcatttcaggtaactaacatgtacctcacactgctagccctgaattctttctcactatatctatcttctaagtatgctcaccatctatgattactcagagagagattactttttataatttgaattataaaaacaagagctttcttttacatttcttcatattaaaattgtgttgtaatattgaataatttatctcaagccacacgtgtctctttttattcccaaaaatgtgctggctcctttcaacttcaccccctaattcagaattactgtcctcacatatactatgtgcaggctgatggtaaccccaaagcatttgctggttgagtatttgcatttgtagactaggaactagacaggcgaagtcaacttgaaaatacaaatgtccatcatagaatctgcagtgtgggtaatctgcataagaataattgagaattttctctaagaaaaattttaacccatagtgaaagccttggatacacaaaataatcttataatagtaaaaaaattaccccaaattattattctttcacatttttcatggtagtttttactaaattacaggtggaaaataagatgctcgtaagagtttatctattctaagaagccacttgctactcctttctctgactgatgaaatacttctcatcctctaggttcaggttaaatgtcatattcatattgaagccttcattgatactcccactcaaactcatttgttctctcttttctgtttctatggcactatattcatgctgttaatacgtattatgttggcttctagcttattttatatagttttgcttctcagagagatttttaacttcttgatggtaaggacctaggatgattttatttttttcatcctcatgcttagttcagttgctgacaagatcaggtacatatctttttaaataaagctccaaaggtgattctgatgcacaaccacttcagagtttatatgaaataaagaatttcttaaataaaaatgaacatttgatgaaaattgaaaatactgactaaaaaactagatgtaaattcagcacaagagagtgctcatagtgtaatgagatgccattattactcatttttaacctattttacattaatttttgttgttatttaccaaaaagtttttaaccaagataccccattgagtagcagctgtctccctgggttttctggataacataaaaagggcagtgccagccagctctgacaccaacgtaatgagaatttgttagactcatgacatctgccagcttaagggaggtactcaacgtaatattgcaaataaagcttgaaaatgacatttttagtagagttaatatagtttttaaaaaaacctttttcccatcatacaattgtttttagtcctctctcagttcaactagcttctatttgcataagaagcattttatgtcagggagaagcagtgttttccagagggggacggggggacagagtgggcagagggggcaggatgaacatgccaaacagccaacactcccaaatagagatatttcttctccgaaatgatcaagataagaggtttgaaatttattcatttggtagtttgaagtgaatttgtttacaaataaaaagccattaatcatttctgaggagtaaggaaggaaattaatatttattatctgctaagtgccaatcatgctttcagaactggaggcctttgtaactaacactcttttcttacctactctactcttctcaccttagagtcaagtctttcagggtgcaccaattatggcgttaaggcatctgaaatttcaaaggccctaaatccccacagtttcatacttttctgtggctacagtgtacactaagccagtaagaagcagtcatttcatatttagacctttgtactaatcagaagaaattatactcaaacaggttaagacagtacttaaagtgtgagcccagaccactgccatcaaactgcagagtgtaggtgcttaaaataaagatttctaaatgtcaccttagccacactaatgcaaaacctttgaaactagggtctacaaagctgtattttaacaaacacttagagtattctaaagtacaaaataaatgactcgggggttcatgcagatacaactttgtaaggacaagatccccaatgagttgcctgaggggtcccttactgaacattctgaaagtggagtgcttggacccatggccaacactcatgccagtaaccttcatagttgttgtgcttcaaggaaccaaaggaaccaaattatagtcaattgtaagcaagtttcactatgagtcttgccaagcaacatactttgctcttctctcatctcctagagtacaaagaaggagcaaaaatgcaatctataaaatcatgtttcagtttttgtttctgtcttaatctgtttatgcaactataacaaaataccacagattagttataaaccatagaaattgctttctcatagttgggcaggctggaagtctaagatcaaaatgctgccaagttcagggtctagtaaggtcccagccagtctctctgtttctatgatgatgccttattgctgtgatttcacatggtagaaggatgaaaaggcaagagatcaaactccccttgtagcctcttttataagggcattaatccattcatgagagcagagactcttatgatttaatcacttcccaaatgggcctaccacttaataacaccaaaatcaggataaagattcaacataaattttgaaggagactcacatgtaacccacagcagtttccaactcccttggacttattttatacttttcttctcattaaatatcagcataaatagagaagaatatgtaggtgtacacgtacatatatataccttcatattggttgtggcctgtgataagtcaagtttggatgttcaagacttagagattatttttgatagatttctgaagccaccagtaggaactaaatgaacattatacacattaagcactacttacttaatagaaggttgtaatgaaagaaatgtgtagatcaaattctagctgcatgtacaaacctttatttataagcagatgaaaccatcatagataatatttcagaaacataaattagctgtttgtcagaataaaatgaccacaaaaatcttcaaagcaacatcttgacaagaaatgtttagagaacaaatttacaatgcaatttaaaactacaaagtttactgtatttgtatgtcctgtttataatgaacatatattggatacaactaatttcaagaacctgttgctagcatccattatagcatttgcaaatcttctagtattgatggagataaataaagttgaaacaattaaaatagccatctctggtcttgcagattaaatgccagctgaccacccttgaaatgggaatttctgaagtagactactgactgattgttaagcttgaaataacatattccaaatatcagaccctcagtgaaatttggaaccatcatccactgcaaaaaagaaatttgctttcttctttaaaaggtgaaaaagcttcattcccattcattatttctaagtgttaagtggttgaaatatatttatatcaatgattttctacatttatattcatatgtatatcaatgattttctattctcctagggtttccttcctatgtacttatagaacacactcattaacttattcatctataataatattactgtctacctactttatcaagtttactgtataacaattataacatactttaatattttatgtgccactaagaaaaaaagaaaacatgctggtaagttgggcaaatgcaatttcacaatttcaagatggtaaacttcgaaaaaaatggcatcatagaactgatgaaatatggggtattttataaaaggtaattttgtaggtattgagacatttacaaagaaaagaatatgacacgtatttttttacaagttttgtgaaagagaaaaattatatcaatattaatgtcaccaagtgatatggtgtagagaacacagtggtcagaagcaacagagagtctcagatgtttcttctacaaaaaaaagagcatctgtagttgttaccagaccccaccacatacccaaagttagcctttggattgcgggtttcctcagtattgttcctttagtggtcaccagaaagatattaccagaaaggggtctggatccagacctcaagagagggttcttggatttcacacgagaaagaatttgaggcaaatccatacagcaaagtggaggcaaatccatacagcaaagtgaaggcaagtttattaagaaaataaaggaataaaagaatggctactctacaggcagaacagccctgagggctgctggttgcccatttttatggttatttcttgattatatgctaaacaaggggtggattattcatgcctcccccttttagaccgtgtggagtaatttcccgacgttgtgatggcatttgtaaactatcatggtgctggtgggagtatagctgtgaggatcaccagaggcctctcttgttgccatcttggttttggtgggttttacctggcttctttactgctacctgttttatcagcaaggtctttattacctgtatcttgtgccaacctcctatctcatcctgtgacttagaatgccttaagtgtctgagaatgcagcccagtagatctcagtctcattttacccagccactatttaagatggagttgctatggttcaaatgcctctggcattttacctctcccttttataacagaaccagtaaacctaagggttgcagagggatgaagatccatcttccgtaacttctttaagctgaaaaggggcaatgatatttctgcctaactatgagggtctcttgtatttggggtagagaggagccggtcagaaagcattggtatgttgagggccattcagaactcctgagttccaacaaaaggttggtatctggaagattaatgtgttcaatttaagaaaatattgagtaagtgtattctgcattcctacacagagtacaacagcaatatattccacatgagaaattataccaaggtaactgaatttgaaggctttccttgaacagggtaatagttggaaccaagctgatatggggttgctagctgattccactgtgcccatgattagaatattgactccagatttttacattacccatcttttttgcttcttttgagcagaagccagagatcactggttgttttacaggaataagcaacgtcaacctaaatttcaggaaaaaactcaaaaataactgatgagactagactctaataacaagtgtaccatagttcttgaaacataatttctctctacagtttcccatttttgctaaagacaaatcatggtaagactgattttctttattatacttggcctaattatttgtataaagtgcatcaaaaataattacttttcacatagattttaaaattggctttgatggaactctgttctataaggaatctcagataagactttttatttaaaggtgagtccagccatggatttgcaccctcaaataactataagttgtgtaaattcctctcctcttgaggtcccaagataccttgggctcctggacctgtcagaaagtgacatttcatgacattctttacttaccacaggtcagaaaccctgtacatagactgtgtagataaggcatgaggccagttttcccaaagtgcttttactggctttacaagtaaagtttgatttttttaaaggaaagcacaccattccagccaaagccttgggaaaataaccagtttctccaatagtgttctgttgaaaaaaacaattcttattgcacttatacaaacaattatattgccataaatgaagaatactcacaactagtttccaaattctgaagaaatcaggtagaaataaataaatatgctccaaatattctttataggaatatactttactcaattgttaaaagatgtaaatagctcaaaaaaaaaaaaaaaaaaaacagtttcctctactctgaaaaacaaaggatcagcaacattatcagaagagtcaaagtggataagtggatgtgtccaagatggccaaataggaagagctccagtctgcagctcccagtgagatcaacacagaacacaggtgatttctgcatttccaactgaggtacccggttcatctcactaggacgggttggacagtgggtgcagcccatggagggtgagctgaagcagggtgtggcatcgcctaacccaggaagtgcaaggggttgggggatttccctttcctagccaagggaagctgtgaacagactgtacccggagaaatggtatattcttgaccaattactgtgctttttgtgtggtcttagcaaccagcagaccaggagatattctcccatgcctggctcggcaagtcccacgcccatggagccttgctcacagctaatgcagcagtctgagatcaacttgtgatgctgcagattggtgcggggaggggcatccaccattgctcaggcttgagtagctcacggtgtaaacaaagaggccaggaagcatgaactacatggagcccacaacagcttagcaaggcctacagcttctataaattccacctctggggacagggcatagtagaacaaaaggcagtagaaagcttctgcagattgaaacatccctgactgacagctctgaagagagcagtggttctctcagcacagcgtttgagatcgaagaacggacagactgcctcctcaagtgggtccctaacccccgtatagcctgactggaaaacacctcccagtaggggccaacaaacacctcaaacagatggatgcccctctgggatgaagcttccagaggaagtatcaggcagcaatatttgctgttctacagcctccgccagtgatacccaggcaaacagggtctgcagtggacctccagcaaacttgagcagacctacagctgaggggtctgactgttagaaggaaaactaataaacagaaaggaatagcatcaacatcaacaaaaaggacatccacaccaaaacgccatccataggtcaccaacatcaaagacgaaaggtagataaaaccacaaagatggggagaaaccagagcagaaaagctgaaacttccaaaaaagagaacatctcttctcctccaaaggatcgcaacccttctccagcaagggaacaaaactggacagagaatgagcttgacgagttgacagaagtagatttcagaaggtctgtaataacaaacttctccaaggtaaaggagcatgttctaacccacagcaaggaagctaaaaaaccttgaaaaaatgttagatgaacgacgaactagaataaacagtgtacagaagacctaaatgacctgatggggctgaaaaccatggcacaagaactttgcgacacatgcacaagcttcaatagccgattcaatcaagtggaagaaaggataccagtcattaaagatcaaattaatgaaataaagacagaagacaagattagagaaaaatgagtgaaaagaaacaaacaaagcctccaagaaatatgggactatgtgaaaagactaaatctacatctgattggtgtaccggaaagtgatggagagaatggaagcaagttagaaaacactcttgaggatatcatccaggagaaattctctaacctagcaaggcaggccacattcaaattcaggaaatacagagaacaccacaaagatagtccttgaggagagcaaccccaagacacataattttcagattcaccaaggttgaaatgaaggaaaaaatgttaagggcagccagagagaaaggtcaagttacccacaaagcaaagcccatcagactaatagcggctctctcggcagaaaccctacaagccagaagagagtgggggccaatattcaacattcttaaagaaaagaattttcaacccaggatctcatatccagccaaactaagcttcataagggaagtagaaataaaatactttacagacaaacaaatgctgagagattttgtcaacattaggcctaccttacaagagctcttgaaggaagcactaaacatggaaagaaggaactggtatcagccacagcaaaaacataccaaatggtaaagaccatcgatgctatgaagaaactgcatcaattaatggacaaaataaccagctaaaatcataatgaaaggatcaaattcaaatgcaacaatattaacttcaaatgtaaatgggctaaatgtcccaattaaaagacacagactggcaaatttgataaagagtcaagacccattggtgtgctgtattcaggagaccaatctcaagtgcaaagatgcacataggctcaaaataaaggaatggaggaagatctaccaagcaaattgaaagcaaaaaaaaaagcaggggtcacaatcctagtctctgataaaacagacttaaagccaacacagatcaaaagagagaaagaaggccactacataatggtaaagtgatcaattaaccaagaagagctaactatcctaaatatatatgcacccaatacaggagcacccagattcataaagcaagtccttagagacctacaaagagacttagactcccacacaataataatgggagactttaacaccccgctgtcaatattagacagatcaatgagacagaaagttaacaaggatatccaggacttgaactcagctctggaccaagtgaacctaatagacatctatagaaccctatatcccaaatcaacagaatatatattcttctcaacaccatgtcacacttattctaaaattgaccacatagttggtagtaaaacactcctcagcaaatgtaaaagaacagaaatcacaataaactgcctctgagaccacagtgcaatcaaattagaagtgaggattaagaaactgactcaaaactgcacaactacatggaaactgaacaacatgctcctgaaagactactgggtaaataatgaaatgaaggagaaataaagatgttctttgaaaccaatgagaataaagacacaatgcaccagaaattctgggacacctttaaagcactgtgtagagggaaatttatagaactaaatgcccacaacagaaagcaggaaagatctaaaatcgacaccctaacatcacaattaaaagaactagagaagcaagagcaaagaaattcaaaagctagcagaaagcaagaaataactaagatcagagcagaactgaaagagacagagacacaaaaaacccttcaaaaaatcaatgaatccaggagctggttttttgaaaaggtcaacaaaatagataagccactagcaagactaataaagaagaaagaagagaagaatcaaatagatgcaataaaaaatgataaagagaatatcaccaccgatcccacagaaatacaaactaccatcagagaatactataaatacctctacacaaacaaactagaaaatctagaagaaatggataaattcctggacaaatacaccatcccaagactaaacaaggcagaagttgaatctctgaatagaccactaacaggttctgaaattgatgcaataattaaaagcctaccaaccaaataaagtccaggaccagacagattcacagccaaattctattagaggtacaaacaggagctggtactattccttctgaaacaatttcaatcaatagaaaaagagaaaatcctccctaactcattttatgagactagcatcatcctgataccaaagcctggtagagacacaaccaaaaaaaaagagaaatttaggcaaatatccctgatgaacattgatacaaaaatctcaataaaatactggctgcagggcatggtgcctcaggcctgtaatcccagcactttgggaggccgaggctggcagatcacaaggtcacaatatcgagatcatcctggctaatgcagtgaaaacccgtctctactaaaaatacaaaaaattagccaggtgtggtggtgggcacctgcagtcccagctactctggaggctgaggcaggagaatggcaggaacccaggaggaggagcttgcagtgagccgagattgggccactgcactccagcctgggtgacagagtgagactccatcccaaaaaaaaaaaaaaaaaaaaaatactggcaaactgaatccagcagcacatcaaaaagcttatccaccatattcaagtcagcttcatcctggggaagcaaggctggttcaacatacgcaaatcaataaatgtaatctatcacataaacagaaccaatgacaaaaaccacacctcaatagatgcagaaaaggccttcaacaaaattcaagagcccttcatgctaaaaactctcaatatgctaggtattgatggaatgtatctcaaaataacaagagctatttatgacaaacccacagctaatatgatactgaatgggcaaaaactggaagcattccctttgaaaaccagcacaagacaaggatgccctctctcaccactcctattcaagatagtgttggaagttctggctagggcaatcaggcaagagaaagaaagaaagggtattcaattaggaaaagaggaagtcagattgtctctgtttgcagatgacacaaatctgtatttaaaaaacctcatcatcttatccccaaatctccttaatctgttaagcaacttcaacaaagtctcaggatacaaaatcaatgtgcaaaaatcacatgcattcctatacaccaatgataggcaaacagagagccaaatcatgagtgaactcccattcacaattgcttcaaagagaataaattacctaggaattcaacttatagggatgtgaaggacctcttcaaggacatctacaaaccactgctcaaggaaataaaagaggacaccaacaaatggaagaacattgcatgctcatggataggaagaatcaatatcatgaaaatggccatacagcccaaggtaatttatagattcgatgctatcccccatcaatctaccactgacattcttcacagaattggaaaaaaactacttgaaagttcatatggaaccaaaatggagcccacataaccaatacaatcctaagcaaaaagaacaaatctggtggcatcacgctacctgacttctaactatactacaaggctacagtaacccaaacaacatggtactggtaccaaaacagatatatagaccaatggagcagaacatagtcctctgaaataacaccacacagctacaacaatctgatctttgacaaacctgacaaaaacaagcaatggggaaaggagtccctatttaataaatggtgccaggaaaactggctagccatatgtagaaagctgaaactggatcccttccttacaccttatacaaaaattaactcaagatggattaaagacttaaatgtaagacctaacaccataaaaaccctagaagaaaacctaggcaataccattcaggacataggaatgggcaaagactgcatgactaaaacccaaaagcaatagcaacaaaagccaaagtcaacaaatgggatctaattaaactaaagagcttctgtgcagcaaaagaaactatcatcagagtgaacaggcaacctacagaatggaagaaaatctttgcaatctacccatctgacaaagggctaatatccagaatctacaaagaacttaaacaaatttgcaagaaaaaacaaacaaccctatcaaaaaagtgggcaaagtatatgaacagacatttctcaaaagaagacatttatgtgggcaacaaacatatgaaaaaatactcatcatcactggtcatcagagaaatgcaaatcaaaaacacagtgagataccatctcacaccaattagaatggctatcattaaaacgtcaggaaacaacagatgctggaacggatgtggagaaatagaaacacttttacactgttggtgggagtgtaaattagttcaaccattgtggaagacagtgtggcaattcctcaaggatctagaactagaaataccatttgacccagcaatcccattactgggtatatacccaaaggattattaatcatgctactataaagacacatgcacacatatgtttattgaagcactattcacaatagcactgacttagaaccaacccaaatgtccatcaatgatatactgaaaatgtggcacatatacaccatggaatactacgcagccataaaaaagggggtgttcatgtcctttacagggacatggatgaagctggagaccatattctaagcaaactgtcacagggacagaaaaccagacatcgcatgttctcactcataggtgggagttgaacaatgagaacacatggacacagggtggggaacatcacacaccggggcctgtcaggggtggggggctgggcgaggtataactttaggagaaatacctaatgtaaatgacaagttgataggtgcagtaaaccaacatggcacatgtatacctatgtaacaaatctgcacattgtgcacatgtaccctagaacttaaagtacaataaaaaagagtcacaaagattacttcagtcttctattagtttagtccactcagttaactcctgttctgtttgatattcatgaacatttcagcactccatgagagtcctgaaaggtttttccctatgctaatgttacaatctccaaagttatcaaaaacctgcatttaagaacacctatcaaactcccatagctgactatcaatcacaatttgaagaggaacaaaaccagacaacatttgtctgtggacaattaaaaaaaaaagtcacaggacagccactcttaaagccacaattgataagaaaattttggttacttctgtggcatacaacaattgtacataacaattacaacttttaataacatacactaagttatatcaggattataggagttttacataattttggaacagatgctaataacatatttatataaacacagccaaaagaaagccaaacaccattttatatttgacaatgtttcctaggtgattttcatactaaatgagccaaatttcactgttgcatttgtacattattgatatcaaacccaattcttaataaaaccttatagacatatctataatgtttttattttaattgttgaccataaggtaagattctcataaaccttttataaacctttacaaatctttgttaaagagcagatcataagcaagtttttgctataagaaaaatcttttgtgcttttattccaatgtttaatttaaggaaaaactgaataatacccctttaactttagccaataatttttttacaagattaattttttacacaccttccacaacttgcttaaagcttcagctttattctaacttaaaacaaactttttaacttttaatatggccaagaacatccacgtttccatgacttcttataatctttcaccaaaaacacatttcactttccttacaagcattacgtgtaaaactgtttcttcagtagtttcaattacgtatattacactgttaactgttagcaactcttacttttggtgaaaaccttggtaagtaagggattataattatgtactaggtgtggagcttaggaaaccagataagtacgactttttccagcattgctatgggtatggctaacaccacatgtttctgggtcttacctaaaatctaatgctccaaagtaggtaaactgaacaattttcaaaagtcaaaggagcagtttatgaccttaaagcatttagcaaacttaatatttgacctgcataatttagaccaaatgtttacatttttgaatatatttttattttaccaataatctttaaaactgtttttgtttcccaaagattacttaagtcaaatgaaccaaaaggcattacacttttttacttttttgaccaaatatttaatttaagcacttattattttaaaccaattaaagcttttttatatcacacacacaacacatataaatacacacacagaagataaaggactcatttcctaagccgagaattgaaccctgaacctgcgctgccattgtgatggtggagaccaagactaaatatcgccacatggttacaaggtcaagctcctaaggacatacaagacaagagggaaacttcaaccagtttttatttttttgcagggggtggacctgtagcaaagtttataagtgaccacttcactgggccatcttgagccaggcttatggggtcctaggcccgcattttgtcctaaggtaccactctttatgaaaacaataccaaaagacacagaaagcacaccagattcattacagcttaagattagcttcatgaatccttttttctattaatcaaaaccttacagaatagctaaagagtgatttctttttaccattcattcaatcagtttgcacagagagagaggccagaagtctgactagtaagaaattcttaccattttgccagcgtgccaggcttctgggttacctttccctgagtggccctagtgacctagctggctgcaccatagccctaggggccaagacccaacacaaaagaatattatcttttcctgtcctggccagagcaaaatatatgggataaaacacagacattagccactctgcttagcacccaatatcaaactggcaagactcaaacttgcccccaattgggccccattatcgttaaaccaacttcctaccaggagtttcaacatgtggtctctgggcaagatggtcatcctgaataacataaaagatagaaaaggggaagaagagagagaaaagcattgcctgtggcagggtagggaaggcaaacagctcactgaggccagagaaagacccatccattgcagcaacactgaaaagttcaggcagccacttatcactagcaaagggatcttttccagcagttccattcactctcaagtttccccttttggcaagggaaaagctacccatgtcccatgatcctgtatgtgcctaattccattactcatagtcataagcaaaaagtgcaaggcagattaatccaaacagaatagcagttaatatcccatagtgccaaaatcattcttagttgagagggactttactgagaggggcctccaaccccctaaatcttaggaagcactctaaccttcataagttaggcctcgagtccaagtttcctcaagcgtttttgctttttattaagaggagcccttaaaccctctctgtcttaagagggactctaactcatctaagttgggcctgtaactcagccctatcctttacccaggtttatgcaccccacatacccaaggtcagccaattggtgcacacagataattacccttggggttgggggggtctcctcagttttgcccttcagggttcaccagacagatgttacctaccggaccctaccacttaagtaacgttagcctctgggtcaggagtttcctcagtattgtcccttcagtagtcaccagaaagatgatatcagaaagaggtcccaatccagaccccaaaagaaggttcttggatcttgcacaagaaggaattcaagacaagtccatacagtaaagtgaaagcaagtttataaagaaagttggattaagaaaatgtggcacatatacaccatggaatactatgcagccataaaaaatgatgagttcatgtcctttgtagggacatggatgaaactggaaaccatcattctcagcaaattatcgcaaggacaaaaaaacgaaacaccgcatgttctcactcagaggtgggaattgaacaatgagaacacatggacacaggaaggggaacatcacgcaccggggactgttgtggggtggggagaggggggagggagagcattaggagatatacctagtgctaaatgacgagttaatgggtgcagcacaacaacatggcacatgtatacatacgtaataaacctgcacattgtgcacatgtaccctaaaacttcaagtataataataataaaataaaacaaacaaacaacaacaacaaaaaaaagaaagtaaagaaataaaagaatggctactccataggcagatcagccctaagagctgctagttacccatttctaagattatttgattatatactaaacaagggtggattattcatgtttccactttttagaccatatagggtaacttcctgacattgccatggtatttgtaaactgtcatggtgctggtgggagtgtagcagtgaggaaaaccagaggtcactctcattgtcatcttggttttgatgggttttagccagcttctttactgctacttgttttatcgacaaggtctttatgacctgtatcatcttgtgccaacctcctagctcatcctgtgacttagaataccttaactcactgggaatgcagcacagcaggtcttagccttattgtaccaagcccctgttcaagatggagttgctgtggtttaaacattaaaatggaatgaatagccatacaaagtacttcttctcagtagatggtggccagaaacaaataggaaggccccagctctgtcaaggaaataaaaattgctgatagctctacattcttctgttatcacccttaagccctaatgctgctttttgaaaaccagccatcagtgtacattccccaagacctgccacagatcacagaagactctgaccatcagagcagtgaacaggggctgggggccgtatcctagaaaggtgaacaacaggtgaaaaaacaggaagaaataaagagaagaggaaattttttaaaaagtgataagttatttctttatgagaaggagggagataggaggattgacgttttaagtaagaggaggtcctcttttgtttaatatttacatggatatttttcttcctttcacacctatttgtgttttaaactgcaaatctgccacttatggacttttaactggtgagcttaatccattcatatttaaccagattactaataatgaagaacttatttttgccattatgctattatacatatatatgtttgtgtgtatgtgtgtgtgtgtatgtatataagtgtatatatctttttgttcctcaattattttaatactgtcttcctttgtttttgattttttttttttttggtgtaccacatttgattccctctttatttacttttcagtatttttttaaattaccttcttagtggttaccatggagatgacagttaacatcctaaatttgtatcaatctagttctaattaataatacattggcgcaacccgctcaggtccctttccatgctgtggaagctttgttctttcactcttcacaataaatcttgctgctgctcactctttggatccatgccacctttaagagctgtaacactcactgcgaaggtacacagctccattcttgaggtcagcaagaccataaacccaccagcaggaaccaactccaggcacttctcgggggcttgtccaggatatcgccacgtggcgagtaccactggacccatgtcacttgctattctgtcctatttttccttagaattcaggggctaaacatcaggcactagttttcctcctagaccacaaaggggactaagaaaggttggatttagtggcccttaccaatgccttcttgaaaacctgcacccttgcctttcttcttagaccacaaagaggactgagaaaaattggatttagtggcccttactgatgcattctcaaaaacctgtcagagtcctaagcgttttctcctgttggtattgggaccttatccttgtcctataaagatgatatgcctcaaaatggagtggagggccataccctgagggagggaagggatctccagggttggaagagtgacgccttttgtcctcacttcttatcatatgaataggaaggatattctcctaatttgggagtctataatttctgagggtccccatatcctagcttcaggaatagcctttgttaggcctgctagactaaggagggatcctaaaattccagatagtccacctgccccactacccactatgctggggctttgggcaaaaattatgtctttctgattggtgagcccatgtgcctaaagaagggaacagagtcccaaaatgtatactagaaatcatttgtataagagaagctagaagagcacagggacagggagtggtatttagaagtgggactaaccttggagaagagaggtgggaggaagtttgtctgacagttgttaggacccagggggcaagggtcaggatagataggatagatggttgactctcgcttaggcaacataactctgagggttctgctcacctcctcagttgtaattgggagactttgctcttttcatgttccttccttgttatgcatgaaaatcccacacccttattagggagggatatattagccatagctggagctattatctacatgaatatgaggaaaaagttacccatttgttgtcccctgcctaaggagggaatcaaccctgaagtctggacattggaaggacaattcagaaaggcaaaaaatgcctgccccgtccaaatcaggctaaaagatcccttaaggcctgaagctcataaaggattacaggatactgttagacatttaaaagttcaatgcttagtaagaaaatgcaacagtccctgcaacaccccaattctaggagtacaaaaccgaatggttagtggagactagtgcaagatcttagactcatcaatgaggcagtaattcttctatatccagttgtacccaatacctataacctgctctctcaaatcccagaggaagcagaatggttcacagttctggacctcaagtatggcttcttctgcattcccctgcactgactcccagtttttctttgcctttgaggatcccacagactacatgtttcaacttaagtggatggtcttgcctcaagggtttagggatagccctcatctctttggtcaggcactggcccaagatctaggccacttctcaagtccaggcattctggtccttcagtatgtggatgatttacttttggctatcagttcagaagcctcatgccagcaggttactctagatctcttgaactttctagctaatcaagggtagaaggtatctaaattgaaggcccagctctgcttacaacaagtcaaatacctaggcctaatcttagccagaggaatcagggccctcagcaaagaatgaatacaccttatactggtttgtcctcaccctaagacaataaaacagttgtgggggttccttgggatcaccggcttttgccaactatggatccccagatacagtgaaatggccaggccactctgtactctaatcaaggagacccagagggcaaatactcacctagtagaatgggaaccagaagcagaaacagccttcaataccttaaatcaggccctagtacaagctccagccttaagccttcccaaaggacaaaacttctctttatacatcacagagagagagggaatagcttttggagtccttagacttgtgggacaaccccacaaccaggcatgcctaagtaaggaaattgatgtattagcaaaaggctggcttcactgtttatgggtagttgcagtggtggccaacttagtatcagaggctatcaaaataatacaaagaaaggatctcaccatctggactactcatgatgtaaatggcatactaggtgacaaaggaagcttatgactatcagacaaccatctgcttagataccaggggccattccttgagggaccggtgcttcaaatatgcacatgtgcagccctcaaccctaccacttttctcccagaggatggggaacgaatcaagcatgactgccaacaaattttagttcagacttatgccgcctgagaggatctcttagaattcaccttaactaatcctgaccttaacctatataccgatggaaggtcatttgtggagaacgggatataaagggcaggttatgccatagttagtgatgtaacagtacttgaaagtaagcctcttcccccagggaccagcacccagttagcagaactagtggcatttacccgagccttagaactgggaaagggaataagaatgaatgtgtatacagatagcaagtatgtttacctatatgcccatgctgccatatggaaagaaagggacttcctaacctctggggtaacccccattaaataccacaaggaaatcatgaagttactgcacacagtgcaaaaacccaaggaggtagcagtcaaaaagccatcaaaacggtgaagaaaaaaaggcagaggaatccatcaggcagatgtgctgagtccaaaattgctgccaggtggaacctcccattagaaatacctatggaaggacccttggtatgtaactaccctctccaagagattaagctccagtattccctgactgaaacagattggggactttcatgggggcatagtttcctcccctcatggtggttaatgacagaagacggaaagatactcatacccaaagccagccagtggaaaatacttatgacccttcaccaaacttttcatatgggtattgagaacattcataaaatggccaaatccctatttacagggccaaatctcctccggaccatccaacaagtagtcaaagcctgtgaggtgtgccaaaggaataatcccttggtccatcataaggccccactgggggaacaaagaataggtcactctcctggagaggactggcagttaagacttcacccatatgcctaagtcaagggaatttcagtatttgttggtctgtgttgatacctttacaaattggatagaagccttcccctgcaagacagagaaggctcaggaagtggttaaagtcctaattcatgaaataattcctagatttggtcttcttccccatctctgattgcaccaagaatagcctaacaggatgtgacacaagtttaactttccaagtccctttatgcacccaacacagcctgttatacacctccattcagatggcttgtctgtttctcagggcccccaaaaatcatgacctccgccctgcttagcaaacatccaggttttgtaatggcaaacatactcgctgcataaccattctcccctggaccctctgcagcagcacccccaccactagtgagtgccttctcatcccctcttttaattactctcttgaatggtttctaacagatacaagatgtgtttttctccaacgggaaaatagaacacttggagctactcagtttgcacccaacattcctttccagctgttcaccagagctactttggcaactactctaggagtatggtaaaatgaaaacaacaaactcacacacctttttaacatacacaaccagttctgtctacttaattgagacgtattcttcttgacattgccacaggaaatcagaccctatcagtgcccctcaaagctcaagtccatcagtgcagggccatacaatggtcactactacaggaactggaatagcaggtttgtccacttcactatcctacctccacatattctcagaggatttctcagacagtttgcaagaaataacaaaatctattcttactctacaatcccaaatagactcttgggcaacagtgactctccaaaaccactgaggcctagacctcctcactggtgagaaaggaggactttgcaccttcttaggggaagagtgttgtttttacactagcccatcagggatagcatgagatgccacctggcatttacaggaaaggcttctgaaatcagacaacacctttcaaactcttataccaacctctggaggtgggcaccatggcttctcccctttctaggtcccatgacagccatcttgctatttctctccttcaggccctgtatttttaatctccttgtcaagtttgtttcctccaggatcgaggccatcaagctacagatggtcttacaatggaaccccaaatgagctcaactcacaacttttactgaggacccctggactgacccactggccctttcactggcctagagagtttactgctggaggatcctacaactgcagggccccttctttgcccctatccagcaggaagtagctagactggtcattgcccaattcccaacagctgttgtggtgtcctgtttagagggggaattgagaggtgaagccagctggacttcctgggttgagtggggacttggagaacttttctatcttacaagaagattgtaaaatggaccaatcagtgctctgtagctagcaagaggattgtaaaatgcaccaatcagtgctctgtaaaatgcaccaatcagcgctctgtaaaactcactaatcagcaggatcctaaaagtagccaatctcgtgaggattgaaaaaagggcattcttataggacagaaacagagcatgggaggagataaataagggaataaaagctggccaccccagccagcagcagcaacctgcttgggtctgcttccacgctgtggaagctttgttctttcactcttcacaataaatcttgctgctgctcaaaaataaataataataataataataataaattggcttcaatagcacacattaaccctgctcctattcagttcttctcccttatgttgttattgtcacagattacagctttattcaatgtatgctcattatcatagatttatgattattgttatatgtatttgtcctttaaatcatatggaaaacaaaaaagaggagttacaagccaaaacatcaataatattagactttatatttaccttagcagctatctttaccagtaatctttgtttttatggcttcaagttaccacctacttttatttcatttcagctgaaggacccccattagcatttattattttcttttttttcctttagcatttcttgtatgacaagtcactagtaaaaaacttccgtgtttttttgttattattgataatgagaaattggttgttaatcctttttagagtcccttgtatgctatgtgttgcttttttcttgttgttgccaggtgaggtatcagagccctggcatcaggaagtggtcaattcgcagtttactaagaagaatttaccaacaatagtatgggtatgcacagtgaaagtttattagaaagaaagaacactgcaaaaaggtgcagtgggggctctcagagaaaggattgagcgcaccatggtgaatttttcttaggagtttttatgaaccttaaggcaggaacttaaggataatttgggccatattagccatgtaggccatgataaatgattacattttgatgccttaacatcagcaagggttgcaaaatgagtttcagcatggcattctggagacatatagaaattctaagcctggagcaagatgctgactttatttattattattattattattattattattattaagttatttattttgagatggagtcttgctctgttgcccaggctgaagcacagtggcatgatctcagcttactgcaaccttcgctcctgggttcaagccattctcctgtctcagcctcctgagaagctgggattacaggaatgcaccaccacactcagctaattattgtatttttagtagagacaggtttttgccatgttggccaggctggtctcaaactcctgacctcaggtgatccacccaccttggcttcccaaagtgctggaattacagatgtgagccaccacgcctggcccagatgctgactttagatactaggcaagtttaattacttctaaattccccagatatggagttttgcctccacatggcctgtttgatggtcaccaggttgtctttgctcccttctaaattcttcagataaaaagtttttgtctccagggcctgttcaatggttaccaggtaattttcactctcctcaggtgattttaagattctctgtttgtttttagcttttgacagcttgcttatatataatgtatctcagcatagatctcaatctctttatttttatcctgttggattttgttgagcttcttggttgtgtagattcatgtttccttcaagtttgggaagtttcctgccattattttttcaagtatctttctttctttctaaacctttatctttctcttctccttctggagacgtccataatgtatatatgggcatgcttggcagtgccccatagatcccttaggctctgttcacttatcttcattcttttttttttttcctgctcctcagattgggtaatttcaagtgtcctatttttaagtctgctaattcttttttgtgcctatccaattctactgttttatcctgttttagtccattccctactgctataacaaaataactatagactgggaaatttatttttaaagggatttacttgactcacagttctggaggctgggaagtctaaaagcatggcaccagcatctggtaaggggcacctgatggtggaaggtaccacatggtgaggaaccatgcactcaagacagagagaaaggggacgaaactcctacaaaataacccacccctgagataacagcaaagccttcatgaactaatcaccccttaaaggtcccacctcttaataccatcatgatggcaattacattttaacatgagttttggagagagtgttcaaactatagcatactcactattatgttccccacacccccacccccacaattttagctgttataattttcagttctagaatttctatttgcttcctatttctatctctttattggtattcactacttgtttgtacactgttatcccaagtttttaagtttttatctatgatttttttcagctctttgagcatatttggtagttaattcaaagtctatgtctcataaatccaatgtctagggcttcttcagtgaagactttggtcaaatcggcaccccgcacccctcccccccaactttttttcctgtaagtgggccatactttcttgtttctttgtgtgctttctgaatttttttttccttgagaacagaacattttaaatactgtaaatttgttaactcaggacatcagattcttccctctccccagtgattgctgttgttgcttgatgaaatctccagatattcatttatttattgacttttccaaaataattttttcaaaaaatatattcctggtcacatgtggttaccgaagtctctgttttgtgatctatgatgtcaggcagtgacctgagagaaatgttctcaaatgcatagattccataagaaaagaagagaaatgatgttctatctctttaaattcccacaactaactgtttggggaagttaattgtgtttgacaattgaaacgatggacaggtcttttgccagtccctcagtaatctgtcaagcagatcaaaagatgcaatctcgattttgggggaacaaaatctgtattgcccactgtggcaccagcaagctacactggaaatgtaagccaccatccttgtgactacatgctgtcaggctgggagatggtgaatttaggtcacttcataaaatattgaaattcaataaaatttaccaggctttttcttcaccaagcattcctctagatgctacgagtattacactagactctagagttctgaaatacttgattcttatgtttcttgccagctcagtagttgtttcagtggagagaccaaatcctggagcttcctactgtaccaccttcaatgacatcactatgactttaatttttttcagcatttatatgctttatgtattgaaaataaagaagaaaggaaggaaggaggaaaggaaggaaaaaacggaaggagggaaggagagagaaggaaaaggagagagagtggtaggtgatatggttgggctctgtgttcccacccaaatctcatcttacagctcccataattcccacgtattgtggaagggacctggtgggagatgattgaatcatgagggcaggtctttcctacactgttcttgtgatagtgaatggtctcatgagatttgatggttttaaaaacaggagtttctctccacaagctctctttgctgccatccatgtaagatgtgacttgctcctccttgctttccaccatgactgtgaggcctccccagccatgtggaaccataagttcaataaaactctttcttttgtaaattgcccagtcttgggtatgtctttatcagcagtgtggaaaataactaatacagcaggaatggatggagggaaagagaaaagaaggaaagagaaggatttttcattgcagaacataaccaagtgcttaattcagcatttcagtcatggggtaaacacagaatcctgagaattgaactttacatggatgagaaaatgctgacacctaagccacagaataaaaggcaactggcctagattcttgggttaccttgttggagtttctgccacatggacattagttccccttttgtcaatattatgttgaaagaggttgtgcagttgctggcatagttgtattcttataattaaatatttgtttgtttctggaattactttgctcttccactataaacagtcaccatggtaaaatttgcagcaccaattttctatcagcatcactatgtattcttgttctcttgctttaatgacatttttcttaggctgtatgactatatgatcctaatggacttaagtgaacggtgcatgggggcagggtggttgtaaactgcatcattctttccatactttctgcctttgtaatcaattttgtaaggctcaaagaaaaatatcaaactccccaattcctaaatgattaatacagagatctaattacctggtaccttaaaatatatattgtgtttgggttgggcccggtggctcatacctgtcatcccaacactttgggaggctggggcaggcggatcacctaaggtcaggagtttgagaccagcctgaccaatatggagaaaccccgtctctactaaaaatacaaaattagccggacgtggtggcccatgcctgcaatcccagctacacgggaggccgaggcagaagaatcacttgaacccgggaggcagaggttgcagtgagctgagattgtgccattgcactccagtctgggcaacaagagcaaaattccttctcaaaataaaaaaaaaatatatatatatataatttatatatatattatatataattttatatatattatatatataattttatatattatatatatataattttatatatataatatatataattttatatatattatatatataaaattatatatatatacacagttagggggaaccctctgaaatagttccaaggaaaataaatttaaattgcatttattaagcaatccactaagtgccagcaggagatttcttcctacagcgttgcagaaacattttagagatatggtttggcatgctgcagaatgcacaggtcttcaaagaaggctctgacctactttgtttctgcctagtctgtgctggttcttgctactgtagctttctgagtcaggtagagtcagtcattgcaccatttttggtagccagtctgctcatacaagacccaaggcagagtcataatacagaagcttctgatttcttacctacatttaggaacattattacaagcattttgctcagagttgaaggagctttctgttttcatcatttcagtgtaaatttcaaaatagctaacaggaatgtcatcttaagtagtagatcatgatttccaaatatacactggctatatctcataggcagcaacttattaataagaactttagagaatatttttttgccataacccaataaggctaagcacaaggatgggagccccaaattaggaacctcattggttttcataggcaatatacattgtgtgccactataatccaaatccatataggcactaccagtcccccttgattaagaagctaaaggtaaagtaaaggggtccaagacacaatcgtgtggaaggaacaaattgaaagactaacctgatcctgaagactactagagaaaggccatacgaattttaaaaattcttctgaataatctttcctctctgccttagacccagctcaaactttctgcattgtgtgccttaatgagaatatttgtcttcattcaatttattcatttaggcactcattctatggacctagtattcaactttccaggaaatgtgtagctcctttcgtctttctcttgaggcttcacgcacagtcaataggtataatttttcattaaaggtccaatatgatttaaaacttaacctgaactgataatttaaacagttcctttaggcaatatttaagcttttctttggataataatgcttagtctcttaggaaaccttcccctcccattgcttctctttcgaaaataccatctatttatacgtgagggaaggttctggttggcccattcttgaggcattagaagggacttcctggtgtgggctggtgttgtgtgtgtgctgatatcctcttgtccctgaggcactgtttcttacttacctggttgctgactgccctgctgccattgagagattttctggtgggtattattcttaatctggtctctgctgcatcaaaccatatttgcagtggctccctgtctgagctgccctgaccatggttcccacgggtactatgaacctctttgaggtcctgcattgactcctaattatttcttcagcccttattacataacattatttggcaagctccttgattactttgaagttccgtatagaatataggaaagcaaggggcttctgggaaaatacatgccttgagatttctctcttcctggaaacaccatacttttttttgtttgtttgtctgtttgtttgtttgtttgtttttgagacagagtctcactcttgttgcaacctccaccttccaggttcaagagattctcctgcctcagcctcctgagtggctgggattacaggcacctgccaccatgcctggctaatttcttttgtatttttagtagagacagggtttcactatgttggccaggctggtctcgaactcctgacctcgtgatctgcccgcctcggcctcccaaagtgctgggattacaggcgtgagccactgcgcccggccggaaacaccatacttataagttaactttgcagtgacaataccttgcaaggtgtcggggttttttacagtcataaatggggagtaagggagagttccttcttctcagtgctcctgtaaaagcagtaggggaaactgggagaaattacttatagcttctctggcctaaccctcaaaccctttccttcccttcccatcaccaattagacagaaaagaacctgaattactttttcctcctcttgtctgaacctaacttatataaaattttggaccagacctcatatccaaactttgataaaaaggaagctatcagggatccaaacaatcctttctaaacacagagcctgactcactggatttgttggaaattttgttttaaatgtcattgaataggagtttcctttctggtaatggcaaaatagcttgtaacagactaaatcttttacagagaaaaaacagacagtctgaattaaatgaaaacaaagatataaaagattttgaagactaaatagaattacaaagatggctgagactggaagaaccaaagtcatggacagaggaaagtcttattgaggtaagctggcctgttgtggctcttttccttaaaacattcaccaatccctgactgctgtagataacaaagactgggaagccaacagaaagtgacttcaaagaggcagaggagatgagcagtgctgttgtcattactgtaggatcatgataaaatttagattgcagggctaatcagataggaaggatttgcgaagccaacatttcatggagaaaaaaaaaaagtgtagagttgtgagcccaatggtgtcagctgcttttactgtcaaggtattcatgattcataaaagtaagcaatgagggcaaagtgaagcctagagagaaatggcagtgaagaaaataaagacctaactgagcttttggcaatctcattatgcttaagagatttaaattggagtttatgacttgtcaaggaagaaggaccccaggatttcagtttggaatcttgaaggactacccccaaagaggaagggaaaaaaatgaataaataaaaacataaataagaaagactaaatgaacaccccaaaacatctcagctcctattaggactaaggttttttttgcctttaatttgctaacagaaactaactaatccagagcttttataattttgtatatacaaaatgtttatttaatcaaaaaaatttaaagatataatgagaatggaccaaaagaaaatgagacaataaaagtagatttgcaggtaatacagaaattaaagttttcagacaaagactttaaaataattttgattggtatgttcagaaacagaggaccaagcaaaattcaccagatacctgagatctataatttaaaaaaatcaaatgtatgctctagagcaaaaaatgcataaagtgtcagtagactgataacaccttgatcattttctttgaattatttctgtgctaaatcatcatccctctgttcagcttcagtgaagggaaaccaagattcaccattcagtaaatcccctaaacatctgatctcttagactcttaagttctttgactgcttctagcatcctctccctactttcctgagtttcaaacttaaggaataagccaggatacaagggtctctccttctctctggccaaattcaaactaatttttaaagtataatgccagagctgaaatgaaacagaaagtacacaaaaatagaccaaaaacagattattaaggaaagaaaattactgaacaaatttgtcagaacaaaaaaaaaatcactagtcatttggaaaaaaaaataaatgtttttatcctgataaactattttatgtcaaaacagaaaaaatgtattagttaatattttgtaatcttagtatgagagcaaagttttctaagcatgaaaacaaagtcaaatgaaaaggtaaaattttctgtataatatctcttagggaaaaaaggaagataataaaagaataaatccaaactatattaaattttcacaatttaggcaggacactataataatgtttctattcttgattatataatgagctattatgaaacaagaatacccaaatagattagaaacataagcaaaatatatgtatgggccattttcaaagatgaaatagaaattacatggtattcagccttacctgaaatgtttaaaatgcaaattaaatggcaattaattttagctttactccattagcctaaaacagaatttagggtttaataatacctattatcagagttcaagtggagaaatgggcactgtcaggaaatagtggtgggattataggttgctataatatttgtaaaggatattctaaatatgaatgaaacaacatagtatgaaaaagaataaggtagggatttccaggatggattttggagaaaactctctacgtctgaatcacagtggttagacacttgtgaagctgccacggtttcagcatctctccaaagttttagctttcctgacaaaggatgactcaagcatctcttggcttcaccatcttacatggctctatgtacatgcaaggatgctggaaaatatacccgttttcaggtccagaatggaaagaaaaagcagatatgcatgaacactaggactctcattctcacaagtgggaatcatatattaaatgtagctattaatattatcgcgttccttttgtcccaagaattccacttttcaaagttatcctatacaaaaacatggaaaagtgtgcagagagatacatttaaagattttatttatagtatcctctatattgttgatagttttaaactacattaccattcaaaagtcatgataaagagctatagttatggacaaagaaaaatgtccataatttatctttaaatgaaatatcctatatcaatacaataacaattgtgtagaggtgtgtttccttgtatttcagtatgtgctgttatctaaatgtttgtgtttccctaaaattcatatgttgaaattctaaccctccaagggacaatattaggaagtggggcctttagcaggtgattagatcatgaaggtggaggcttcgtaaatggaattggtggccttataaaagactgcagagagatagctatctcctttcatcatatgagaacatagtgagaaggtgccacctatgagaaaggagccctcaatagacgataaatctgctggcaccttgatcttgaactattcggactccagaactatgagacataaacttccgttgtttgtaagctacctagtttatggtgctttgttatagaagctgccaagtgaacacagggggaaaaagcatgtatgagcgacactgtaaaggttttcacgcttgcttacattagcaagttaaagttgtggggattgtcctttagtagaaaaatgtaaaaaactcttaaaaatgccttacttagttttaaaagtaaaagcattttttctttcattcttgcttttgtcttttaatatgtttcaaaaaggacaaaatatattatgttcacaaactcataatataaacatgtgtatcagacccaaagtaaatgtaaatttaaaaatggaaatgtaaaacatatcccattcactacatactgaaaattataaatacttacaaataaaagtaacaagaaagaaacaggaaatatatgagataaacaataaaatcttattgtagaatataaaattaaatctgaacacatttgaacatataccattctctttatgggaggaagtactttcataaaccactattctctctaaattagtataagtgtaatatgcctctaattagaatgataatagagatgtaaatcaaattctataaatggatctcgaagttcatatggaagaaaatgacacctaagattaagcaaaaagaagaggacggtgatgataataaagagagacttgcctaacataaatcaggctacaccaaaaattccctgtgattgaatcaatatatcattagcataaaaatagatgcatggatgggtgaaacaagatgtagaaaaaataaatgggcattagcatatatgagaatttcctacacactaatactagtatttcaatttaatggaaaaaataaattataagattgtgtcatgattggttatttatatagaagacaatataatttttcctgatattataccatatacaaaataaaattacacaggaaataaatacttaaatgaatttaaagtttaaatatttataaaactttaaacaaccagggaaacaggtccaataccttaatggtgagctgaagggaatgttcttaagcaatatgtaaaaccagattctataaataaaagataggcatttctgtctaaaaaaatgtgaaacctttgagaggcaaaaagcaacataaaccaaagtaatagacaaacaatggatttggaaagaaaattgtaaattattcaaccaaaaatcgtttgctatttataaaattgagaaataattttgcaaacaataaaacaattttccataattcatacttcatatatacttaactcacaatttctaaatgacaaactgctgaacaatgtaaatgtaaactatgcatttagaatctcaacacaaagcccatggccagtcaggtaaagacaatatttaattactaataaagcagacaatcctatactttggttaaaaattccatgttatttttttttcttttatataaacattatttcccaaggatccatgcagagtaaatattgtgagtggcctctacgtaaagtgttttaacatgtaaaaagtttttgtgtttaaacttttccttaacaaaatgcaaagctctgaaattttgacaagaaaaagggcaaataactcaataaaaatgggaaagagatatgagaaaatacatttcttaaacgtaaatcctaaggtcaagaaatatatgctcaggtcggatgcagtggctcacacttgtaatcccagtactttgggaggccgaggtgggcaaatcacctgaggtcaggagttcaagaccagcctggccaacatggtgaaaccccatctctacaaaaaatatgaaatttagtcccagctactaaggaggctgaggcacaagaatctcttggacccaggaggcggaggtttcagtaagccaagattgtgccactgcactctagcctgggcaacgaagcaagactctttaaaaaaaaaaagaaagaaatatgtactcaaactcaccgggagtcaggaaaatgcaaattaaaaattaaagtaacactgagatatcaccttcctacacctttaaaaggagcaatagcacttactgttggtgggaatgctgatacaggatgccttcagaggaggaaacaaaactggaattgtttaaaatctttttgggaaaataatcaggcaatactactgaaattagtcaatatatcatttgagctatgaatttgccatcctcctttttggatcatatttactgaaataaaaacacaggtattaaaatatatatgcacacagattttattagagcattggttgcagtgagaatggttgaaaaagatggtacattcatactttcagagtcgcttcaaccagagtgactccaccttgaacaggggctgggtaaaataaggctgagacctactgggctattcccaggaggttatgcatttcttttcacaagataagataggaggtcagcacaagatccaggtcacgagggccttgctgctaaaacagggcccattaaaaagccagccaaaacccaacaaaaccaagatggcaatgaaagtgacctctggtcgtcctcactgctcattatatgctaattataatgcattatctgctaaaagacacgcctgccagcactatgacagtttacaaatgccatggcaacaacagaaagttattccatatactctataaaggggaggtaacctcagttctgggaattgccacacccctttcctggaaaactgatgaataatccaccccttatttagcatataatcgagaaatattaataattatttaataactgtaagtatactcagtcaagcagcccatgccactcctctgcctatggagtagccattcttttgtttctttacttctttaataaacttgctttcactatactctatggacctgcccagaattctttcttgcatgaggtccaatctcttgggatctggatcaggacccttttccaataacaaaaccatgaaacactatgcagcaattaaaagaaataaaatagaattatacctgttgaaaataaatttccatgaggtattcttaagtgagaaaagcagaatgcagaatgtcaggcctctgagcccaagccaagccatcgcatcccctgtgacttgcacgtatatgcccagatggcctgaagtaactgaataatcacaaaagaagtgaatatgccctgccttgccttaactgatgacattccaccacaaaagaagtgtaaatggctggtccttgccttaactgattatattccaccacaaaagaagtgaaaatggctggtccttgccttaagtgatgacgttaccttgtgaaagtccttttcctggctcatcctggctcaaaaagctccccaactgagcaccttgcaacccccactcctgcccaccagagaacaaaccccctttgactgtaattttcctttacctgcccaaatcttataaaacggccccacccctatctcgcttcactgactttctttttggactcagcccgcctgcacccaggggaaattaacagccatgttgctcacacaaagcctgtttggtggtctcttcacacggatgcgcattaaacagaacatttgcatataatctcatattgaaaggaaagaataagctccatatgtgtgtatttatactttgcacttctattgtatataaataagttgatgaaaaaacaaactctttaaaatatttaaagaagtgataataatgaagaggaacttggcttaacatacatcagaatatgacaaaaatctcctataactgaatcaatatatcattagcataaaaatagatgcatggatgactaaaaccggtttctaaaccaatatgagtgaccatggccctgggaacagtctcaagggatcctgagaaagtgtgccctaggtagtcaggttacagttaagtattgtacattttaaagagacggacattacaggcaaagacataagtcaacacaggtaaggtatacactggttcagcctaaagaggtggaatatcctcaaatggggagaagtggtagcttacaagtcataggtagattcaaaatttttctgatttataattggttcaaagagttatgctttgtctaaagactttaagtcattagaaagaaatgcttgcattaagataaggggagctgtggaagccaaggttcttcttatgtagatgaatcctccaggtagcccctttcagacagaataaatggtaagtgtttcttttcagatttaaaaaaatatcagactcagttatctctcctagatccaggaaaggcccagttacattaatgcagattctctatgggtgcaaatttcccccatgaaagacggctttgcagggccatttcaaaatttgtctaagaaatatattttggagtaaaatatttttatttcctttagggtcagctatgtgtcatgtaatgctataccaggaacaggtgggaatttggtatcttattgccacaaagagtatgtttttttcagtcttataatctctattttaactttaattttggtcagttgtgcctaaacctcaaaagggaggaggggctgggcacggtggctcacacctgtaatcccagcactttgggaggctgaggcgggcggatcacaaagtcaggagatcgagaccatcatggctaacatggtgaaacctcatctctactaaaaatataaaaaattaccagggcatggaggtgggtgcctatagtcccagctacttgggaggctgaggcaggagaatggtgtgaacccgggagatgaagcttccagtgagccgagatcatgccactgcactccagcctgggcgacagagcaagactccgtctcaaaaaaaaaaaaaaaagggaggaggtagaatgaaggaggtaggtccgacccccttcctgtcttggtggaaattcagtttttcaggtttctctggggtcctgttagccaagagagggtccattcaatcaattgggagacttaggattttatttttggtttacaaattgaacaaaaatttgaaaggacaatgattaggttgttctcatatgttttctaaaggtggggatagggaggcctaagggaggatggatatgagaagaaggaatgatagcacagaggaggccaattttgctgactatcattttccatgttgttgtgcatgactctcattagaaggatccaaaaagaattgtcccaattcatgcaaaagcgatttcctacaccaccaagtaggaatctgcataatgggtttgggaatcaaaaatgtcaaacataaggcatgggaccctagatagttacttaaggtctcagattttcactttccccaccttataataagatagtaactcatagcaactgatagagttgtgaaggtattgacaatgaaaatgagtgactgagacataagtctcgatcatgatcattgaggtttattaagtcaccttagggtgcatctgagaaaaacacaagccacagatacatctgcatctgtttatctgaagagatttttaggaactttggtatttatacatctccttaatgggggaaaggcttgtaggaagagggacaggtagatggttaggcaagcactacattttacatacggcgaatatctgaagaggaaaaggaagtaaaggaagggtcaattatgcagatgtctctaagtagatgaaggaaatgacttgactttgctatgcacctaggaaggtaagcttgtaatggatgttatcagtctggagttttaaaagctagacttacattgtagacctacagttacaattggcttgtcctcttttaggggagatcagcaaaaaatgtactcatgaatggtctgtggaggctgtccttccctgatgcctgaggcctttttcctctgcatgggtatctggctgatacagtgttagtaacagctattcatttggaagaggatgttgcaatgaccttccttttgcatacaaagcttggtgggggtggtgctggaattttttaaaaattatcttttacagtattaaggtaaagtatgtaacatacttagtagagtatggacacataccaagcactcaaaaattttaagtctttgctttccatttcaattgaattatgtctctttatagtctgcagtagtcactgttaaataaaggttagcctaaagttgcctccttatatattttaggtttgtactaaaggttttcccgtacatcatgaactataacaagtggaggtgtaaacagaccttagcctacccttatgccaatcactgaattttgccaatcaaatatagccaactgttcaaaccatgttcagataacgcaaacgctcagctaaccaatccagctgtttctgtacctcacttctgttttatgtacatcactttcctttttctgtcaataaatcttcttccactcccctggctcaggaggctgcccaatttgtgaagtgttcattgctcaatcaaactcccttaaatttaattcagctaaaatttttcttttatcatcacttaaaatcaattcttaaaatggataaaggctgacagcaatccagatttgttttcaagaactaagattgaaaataatttttaaaataagaattcaaagatttgttagatactcaggagtatacaatgatcaccagggctaactaatttaggtctgttaatatactctgtgaccattttgaggtatggcttttttttaaagccctcacaaactctagttatcctgctggagaagatagtgtttcattattcagttggatgcacatggttgtttttcacatcttttcacaattttggggaccaagcttatcagagagcaaaagaacaaagttaactggagacgaaggagcagggaagagcccagcaagtcaggtagaaataaaatttacctaataagtatacacttttttaaccctttcttcattttgcagtgtgctgtatcacactgaatatgaaaccacctttgcaaaaattatgactgagaaaattatgacagtgaaagagatctgacctaactgactccttcttgcttctaacatccaagttgtctagctcattcctgagcataagccaaactaactttgggaggaatgtattttatagtttgactttgagacagagatgataacagcccccttcttgcctgaggactagaatgcctttgcaggagtaacaaattaaccaagggtgagaaattatctttcaggagtcactgttataaaacatgagataagtgcttgagatattttccagacccggcctttcgatgcaccagctgatgccgcccagaatgataaactgtctcatctagtcttgtggtcccccctttctcaaccccataccctacaaattatccttaaaaactctgatccctgaattttcagggagactgatttgagtaataataaaactcagttctcccttaacagctgcttctgatgaattgaatttctttctctattgcaattcccctgtcttgaaaagttggctctgcctaggcagcgggcaaggagaatgcactgggtggttacaaatataacaatgtttccagagcttgcatgcatactattacatgagttggaggtatgataggacacagactattaaataagcatatttttaactttatagaaataaaatgagataaaaacacaagagaatacaaaatagccaggcagataggaaaaagaaccaaataggacttcctcaaacaaaaaatgttattgctaaaatgaaaacacacatacacacacacacacacacaaatacacacacactgattaaatcaaataacagagctgaggagagaattagtaaactggggatagataccaagatatcattcaaaaactatctggagaaacaaagaagtatcttcttccatatatgagggatcaaagacatggaggattgactgaggatttctcacacacctctattttgggttccagaggagagatgagagagtatgggaaacacagtgtttgcagaggcaatggctaacaatttgctaaaattattaagaaacgtgaatccccagattcaggaatgcaataaatatcaagcagaacacataaaaataaatctatacctacacccatcatataaaactgcaggatatcaaagatgatgttgagatcttaaggaagctagggaaaagcaaattttccctgtaaaaagattgatagaagacttctgaaaggcaacaaaggaatccaaatagtaaagagaatggaatgatatctttgaagtgccgagaaaaagataactaccaacttataattacatacctagttaatgaggctttcttttttgagacagaatcttgctcagttgcccaggctagagtgcagtggcaccacctccatttattgcaatctctgcctcccaggttcaagtgattctcgtgcctcagcctcttgagtagcctgggactacaggcacgcaccaccacagctggctaatttttctatttgtgttagtagagatgaagttttgccatgttggccaggttggtctcaaactcctggccttagatgacctgcccacctcggcctcccaaagtgctggggttacaggcatgagccattgtgcctggccaagactttcaagaaaaacaaaagaagaaaggagaaagatatttttaaataaacactgagactatactaacagcaaactctcattaaagcaacttctaaaggatgaatttgaagactaaagaaacagactccaacacaatgtctaggtgacaaataggaggaacaaagaagttgttgaacatgaagataaacataaagccaacgttgatatgtcttagaaaactcagatacagtggtcttaacctcacaatggcctattctgtcatgtgaaagacttagtcactttcattctgctctgcaataccaggcttctggcagccaataaattcatccaaatccagacaacagggggagaaaaaggcacaaaaagtcttgcttttataaaaaggcttccataaaattccacataatactttcactcaatgtttggctataatttagtgatattggcactcctagaagcaagggaatctggaaaatgtagttacttaaatatcacaggaattagattcatttaaaaggggagaaaatgagagtacaactgcagtctctgccacatatctattggtaagttttagtaaacagttaataaactaatcacttcagttttatacaaattatctcggaaatatgaaaaacataaatactctgcaaattgttttatgagaatagtatgaccttaattacctaaaccagacaagtataggataggaaatgaaaattactagccaggttcactcatgaatatagataaataaaatattagcaaattaatttagtcatgtatttttaagaagaaatccacaataaccagtgtgtctcagcagtgtagacctgtaggtgtgaagcccaaattgcccttaaagaaaatctttgtttaagatctgtttggagtattgtgaaaagatgtctttcagcagaagccccttcaggggctgttccagcttcagagtgataacttgtccaaggtcatgcccttacaggaatgacattacacctcatgggcagctgaagctataaggtctgcatcaaagccagacctccccattagcgtaatcctactatttccccatccattccattggtattggtcttaagaatatccctaataaatatcctgcaaactgaaacttctccgagtctgctccctttgggacctaacttgtaacacccagaaatgcaaagatggtttacgaccagaagatccattgatatgattcaccacattaacagattgacagggaaaaaaaaagcatttgattgtttcattaaatggagataaatggttcaatacaattaaatatctatttatgataagaactcttaacaagcttggaataaaaaagaaaagtctttaacctgataaataaaggtatttgcacttaactgcactgcctaagacttccagcacaatgctgaataagagtagtgagagtgaacatcctccttgccttcttcatgatctttagggaaaactattgagtgatcacggttaagtataattttatatgtaggcttcttatagatgtgctttatcaaactgagacaatttctattttttgagaatcttaattatgaatatattttgagttttgccttttttttttttttttttttttgagatggagtctcactgttttgcccaggccggagtgcaggggcatggtctcagctcactgaaacctccacctccctagttaaaacgattctcttgcctcagcctcccaagtagctgggattacaggcacgtgccattacgtctggctaatttttgtatttttagtagagacggggtttcaccatgttggccagtttggtctcaaactctgacctaaagtgatccatccacctcggcctcccaaactgctgggattacaggcgtgatgtgccgtgcccacctggagttttgtcaaatgctctttctgcatcaatttatataatcaatgatttttcttctatagcctcttataaaggtgaattacattgactaatttttaaatattaaaccatacttaaatgcttggaataaattttactttgtcatagttcatatttgtatatctgaaccctatttgctgattttttatggacatgcatctattttcatgaaggatatttgttgtaatttttattctttgtattgtgtttgcctggtttgggaataagagtaacattagactcataaaataaattaggaattgtttccttttcttctattttctggaatagattatatagaattggtgttaattcttctttaaacatttggtaaaattctcctgtgagaccatctgggtttgttggtttcttttttgtgagttttttaattaggcattaaattttcataatagtcatagggctattaaattttttatttcttttttggtaaattatgacaatttgtgatttttgaggaactttaagtcatcaaattatgtgtttagatgtatagcttgttcataatgttctcttgttatccttttaatatatacacgatctgtagttatatctcctgattcattcctgatactataatttccgtcttttctctttttgtcagtcatcttagatgctcatcaattgtactggtcttttcaaagaaccagatttttatttcattaattttctttatgatatttctgttttcaatttcactgattttgcttttacttttattatatctggccgtctgtttgctttagttttatgttgctattttttcctcgattcttcaggtggaagcttaaattattgatttgagtgattccccttttctcatgcatgcattttggttgagcaaagcttcagttgtggcccacagtttttaatatgctttactttcattttcacttagttcaaagtattctttttttaaattttctttgaaacttccttgtaaacttaggaaatgcaggtgtgctatttagtttttaagtgttagcagatttttctgttaagttattgatttctaatttgattccaccgtgcttggagaacatatcctacatgatttcaattcttttaaaattgtataagatttgttttataggccgggtgcagtggctcacacgtgtaatcccagcactttgggaggctcaggcaggcgggtcatgaggtcaggagatcgagactacctggctaacacagtgaaacccaatctttactaaaaacgcaaaaaaattagccaggcgtgttggcaggcagctgtagtcccagctacttgggaggccgaggcaggagaatggcatgaacccagggggcgggaggcagagcttgcagtgagctgagatcctcccactgcactccagcctaggtgacagagtgagactccatctcaaaaaaaaaaaaaaaaaaagaaagaaaaaagtttgttttatgacccagtatatggtctgtctgtattgggatatgtcctgtggacccttgaaaagaatgtatattctgatgttgttgggtggaatgttccatacattttgattagatcatattgttgatggtgttgtggagtgcttttgtattcctaatgatttcttgtctagttattctatcaaatgttgagagaaggttgttgtagtgtccaataataattgtgtatttttctatttcttcttccagtgctatcaatttttgctttatgtaatttgcagctctgttgcttcgtgcagaaacataaaaacttactatatcattttggttactgaaaaatttatcattatataatgtcacactgtctctgataattttctaggctatgaagactactttatttaatattaatatagcctgttttctcttgattgatgtttacatgatatatctttttccatcctcttattttctatttgcttatattgttctatttggagtgaatttcttacagacagcatatatcagataatttttaaaatttactcttatgatctctgcctttatttggtacatttaggccatttatatttaatttttgatataatagagttgaagtctgctgttgtattttactttcctgtttgatctctttttattacttctgttttcttttcttgctttcctatgggttacttgagcaatttcatttttacttttttgtagtgtttttatgtgtatttctttatatagttttttttctcttttagtggcttttctaaataatacataatgtatacataatttaccaagcatactataatcactctactagttcaagtgaaatgtagaaaccttaactctgtctaggtccctttattctcacacatttaatatatagctgttttaaatattttctctatgtacatttagaggcagtcagtgttatgattttgtttcaaccatcaggcataatttggaaaaacacaggaagagaagagacacctattatatttacccatgtttttgcttaatatattatttcttttttcttgatgctccagtgatccttcttttatcatgtccattccgtttaaagaagttcccttatatactactttagagtggcctgatgatggacaaagtatcttagatttctttcattccagaatgtcttcatattgtcttcatgcttttattgattttgctttgtatggggctctgagttgacagtttttttctctcaacacttaaaaagtaatgtgccacttccttctggcctccattatttttgatgagaaactcattgtcatttgaattgtcttcccctgtggataaagagtcttttttcctctggctaattttaagatttcttttctttagtttggtatctaattacattgttcttagcatgaatgtctctgagtttatcttgtttaggatttccacagattcttgaatgtgtaagtttatatgtttttccaatttggaaaaatattcattcattattttttagcatactttttgagggctgccctcctttttctctttttcttggattctgatgacatgttagacctattgttacagtcttgcaggtctctaaggttgtattctccttttctttcagtctattttctttccattgtttatataagaattacaattgttccattttccagtgtgttaattctttcctctgactcctccattctgctattgagatgatccactgagctttttattttggttatcttattttttattctaaaatttccatttgattcttttttatattctctattttttttctgagacattctgtttttttatttgtctcaaccatgtttgtaactgcatcctgtagcacagtcatgatgactgccttagagtatatgacagaagacaattctgatatctctcccaccttagtgttgccatctgtattagtctgttttcatgctgctgataaagacatatatgagactgggaagaaaaagtggtataatggacttacagttccacatggttggggaggcctcacaatcatggtggaaggcaaggaggagcaagtcacatcttacatggatggtggcaggcaaagagagcttgtgcagggaaactcccatttttaaaaacatcagatctcgtgaaactcattcactatcacaagaacagccaagaaaagacacccccccataattcaagcacctcctatcaggttcttcccacaatacttgggaattgtgggagctacaattcaagatgaaatttgggtggggacatacccaaaccatgtcattcttctcctggccccttccaaatctcgtttgctcatatttcaaaaccaatcatgccctcccaacaggacccccaaaatcttaattcatttcagcattaacttgaaagttgacagtccaacatctcatttgagacaatgcaagtcccttccacttacaagcctgtaaaatcaaaagcaagttagttacttctagatacaatggggtacaggcattgggtaaatacagccattctgaatgggagaaactggacaaaacaaagggactacaggccccatgcaaatccaaaatccagcgaggcagtcaaaccttcaagtttcaaaatgatctcttttgacaccatgtcttgcatccgggtcacgttgatgcaagaggtgggttctcaaggtcttgggcagctccacgtctgtggctctgcagggtacagcctccctcctggctgctttcataggctgatgttgagtgtctgaggtttttccaggcacccagtgcaagctgtcagtggatctaccattctggggactggaggatggtggccctcttcacacagctccattaggtggtgccccagcagggactttgtgtgggagctccaaccccacatttcctttccacactaccctatcagagattctccatgagagccccacccctgcagcatacttctacctaggcatccaggcgtttccaaacatcttctgaaatctaggcagagattcccaaacctcaattcttgacttctgtgcatttgcaggctcaataccacgtgaaagctgccaaggattgtggcttgcactatctgaagccatggcctgacttgtaccttggccccctttagacatgacaggaggagctgggtacgcagggtaccaagtccttagattgcacacaacatggggaccccaggcctggcccatgaaactattttttccttctaggcctctgggcccgtgatgggaggagctgccatgaagacctctgatatgccgtagagacatttttctcattgtcttagggattaacatatgcaaatttctgcagccagtttcaatttctcctcagaaaatgggattttctattgcattatgaggctgcaaattttccaaagttttatgctgtttcccttatgaaactgaatgcctttaacagcatccaagtcatctcttgaatgctttgctgcttagaaatttcttctgccagataccctaaatcatctctctcaagttcaaagttccacgaatctctaggaccggggcaaaatgccaccagtctctttaccaaagcatagcaagagtcacccttgctccagttcccaacaagttcctcatttccatctgaggccacctcagcctggactttattgtccataatgcttatcagcattttgggcaaagccattcaacaagtctctaggaagttctaaactttcccacatttttctgtcttcttcttagccttccaaactgttccagcctctgcctgttacccagttccaaagctgctttcacattttcaggtatcttttcagcaatgccccactctacttgtaccaatttactatattagtccattttcacgctgctgataaagacatactcaagattggggagaaaaagaggtttaatggacttacagttccacatggctggggaggcctcacaattatatcagaaggcaaggaggagaaagtcacatcttacatgaatggcaacaggcaaagagagaggttatgcagggaaactcccattttaaaaaccatcaggcattgtgagactcattcactatcatgacaacagtgcaggaaagacacactcccataattcaattacctcccaccaggttcctcccatggcacatgggaatcatgggagttacaattcaagatgagatttgggtggggacacagtcaaaccatatcatcatccaatgactatcttctttcactcaatttgagatcctggttcttggtatgaaaagtgatttcagtgaaacatagtcatatttgccttatgttatgcggttctggattttatttaaacctttcattttcactgactttctctgacaccattctatcaggaaaatagaacactaccttttaactatcaggtggagacagaagttcagattcaccatttggcctctcttaaccctgaggcttggccactcctttttactgctctgtgctctctatgtagtttccactgacattattgtgggggtggtctttttagaactatacagtggtaaaggcctcactctccacttggtgtccttcaacatcactctagcaggaagggagagggccactttgtcactgctgagtgcggatagaagttcaggctcctcatgtggtcttcattgacactgtaagcagggatcctaattactgggcagtttcaaatctctacttgaccttctctgacacaattgttgcaggggtattggggtagatacctccttacagtcttgcatgggtagaagtcaaagttcttcatactgcctttgttggcatgtatggggatttgaccacagatttgagggaatttccattacctattactttattttagacaggaacagaaattcccctcattttctttgttgtcttggttttaaatatgtttattttggagcataaaacctcagaacatataagtttattcttcctctcacacatcaaaagttttccatttccaatttctttttaccccatgcattagattcttattctacttgcatttgaaaaccttaagtggtagcaaaggcttattaagtgaatggataaataataaatgtattaataccaaagcgatgagagtgagaaaaatcattctgttatctttcccagtcctacaatttgaagaagtttcttagcaatttttaaaaatttatagaattgcattatttaattgccatacagcttcaaatagaagtagtacaacatagaaagaactcaagagttgagagctgcatcctaattatgccactgactaactaaataatcctaggaaattcacctctatgaaaacttaatttctgcatttacaagacggaaacaaacatctgtcccttcttacggattatgaatgcttcaatgtcccattaagtgaaaagtaccaagtaaatcaagtttaataagcataataacaggataatcaaatttcacacaatctgtactcaacaattaattaggttcttagtgtgtcagaaagaagagaaatccaatttttaattgtctctaagaattatcaatttttaaatcctagaatttagcctttaacataagtggcagaatatcaacatagtttcataagagcatgataataaaagtaaaacacaataaaatttattaattttaagtatcttcaagttactatgtaattcatcacaagtacctagtgatcaccattccttaggtttcttgtctgcagaagttctaaaataatatggtcaggataaagtccaatatctttgtatataagtgtctagaatacttctaacagcttagaatgaaactctgatttaggaagaatgaatctgagtagatagtccaacacaaattaggtcataaaaataaaacaactgcaggaaacttgaagttgcttgttaaactagagaaaaccatttattgaaatctaatgtatggatgtgtacctttaaggtttgtttctgactttaactggaggattactttaaaattgtttgtttctcaacagaccatatactgagaaacaaaatgaaataagctttttcctacttcaataggcatgagaaaacctctctaacactgagttttaaaatagttctaatgaatataattataaaaataaagcattcagattgtatctagtatacctctctctcaaataactaccataagaaacaaataaatagaacaaatgttctcaaatgtaaggtgtgacaaatcatctttaatgtttcttaccaaacttgtatatcaaatattaacccatattataagtatacacttgatattcagaattattatctagtcttggctgtgtaagttgttatgtcatctgaggattgtcaaagataaattgcactggacaggttaaacaggctaaggagatttttagtcaagacagttgcagtgggagagagactgaactgaaataaaaataagggagagattgaactggaacaaaaggcagaaaagtttttaagtgcctgtattaatccattcttaggctgctataaagaactacctgagactgggtagtttataaatgaaagaggtttaattgactcacagttccacagagctggggaggcctcagaaaacttacagtcatggtagaagtgaaagcaaacacatccctcttcacatggtggcaggaaggagaagaatgagagctgagtgaagggggaagctcctcataaaaccatcagatcttgtgagaacttactcactatcatgagaatagcatgggggaaactctccccatgattcagttacctcccactgtgtacctcccacgacacatgcggattatggaaactacaattcaagatgagatttgggtgggaacacagccaaaccgtatcagtggttgagtgaagtagcggaaaaagtgagggcagaggttggtcaatataattaggctacctgtctttgctaatagtagtttatggaagtcagactcctaccttggcagagagactaagacagagaggcactatctaccttgatgattatatttcaaaaggatggctctcaggtccttgagaaaaaaatttcctggattataaacctggtaagaggctggaagaagatttacatctcaaaggggcagagaaagaatttacaactgcaaattttctaaagtaaatgctctgagaaaagggaaatcaggggcctacagtcaaagataaatgtgtctaaagtttagtcagcctgagggaaatattaagggcatcttggtcaggatattatttattatctccatactatctggaaaaaagaagaattcagacttgattaacactaacccaaattgtgttctgtgggaggcaaacttaagacctacgagatgtttcaaaaaatattttattctcaactaatgtagtatttactctgctaattcacaatgtttgtgagcaaattacaggcactatggcgtcctgcagtttaaataaaacaaaacaaaataaaaacactctagcctttccttaagtcaatatttttcaaattgaataccaaatccctgaaaaacttacatttcaagaaacagaattaaggatcaaataatccgtaatttcccctttacttctaaaattctgttattatatgcatttaatagcattattttcttggaatacaaaaattcatttctggtttttgtgcgtctttaaattctttgctccccatctctgcactctaatgcaaatccccagatggattctttaacgcttcaaatgatggagaaatcactacagatttttaaaattccaaaacagaccatttagtattcaaagttttctaaagccagtagctactcgactaatcattacttgtatcttagaacaagtaagaggattccatagaaattcaggggaaaaaaaagaatcctaaaaaccattactaagcaacaactttttatgtgtaatcctttgattgtttcttgagaaatttccaaaaaaaaaaaaaaaaaaaaaattgaaaggagggaagggaggaagggagaaagcaaaagaaagccgtgtgtgtgcatttatctccaagggtccttatttcactagttatgtaaacaaaatttatatgctcctatttatcttactttctgaagtatcctgagagttttagccttgtaaaatctcaggcagcatttcagcttcaaacttcttattaaccattgcagagggaggggttatatactgggaacatttattttcttcgctgacagaagtaagtatagagccaaatggctgaagttagttggcaaatttctcactttattataacaaaggctagggagatagctcctttgagccacataattctaattttgccaattagtaagagcaaactgagaagcaaactggtattggattttcttgtaaatagtacaaatacattattctaccacagaacagaagatattaatgtagcgttccttcaagaaaataatagattaaggtcaccaatataaataaaataagctttatacaattagctcagaaagttagatgaaaatttttaaaaatgcttttgattattaaagcataacagtgctgttaaacatatcagtttatgttactatgtgcattggggttggtatatctaagactaatgaagagcaaataactaaaatgacttctactgttacttacctctgaacagcgacggtagaagacaaaaaccaaattactctgtttttccctgagaagttattcatgttttaacttttcataagaatcctatcccgtaattatagatgtcaaaagaaatctcatttccaaccatgaaaagtgaattttgagtcccaaatatgcattttagaagtacaagctaatgttaagtttacaatgaatacagttgccttagaaggtaatagaatattttaagtaatgtaaacatatatgtaaataataccatactttaaaaatctgttcattttcttctaggctcacatatttgtccattttacatgtttagtactatcacgtacagaacacaacacatattattgagaaaaatgatgaataataacataacgtgccaaatgttagagaagtgaccttatctttcgacaattggaatgtattttctaaaacaaccaagaaagacaaaagttcttttctataaatcctttagtttataatctatttttcattctaaatctcattttatttaatctattattgtactctcagaaaaacctgatgttattctacataagataggatatgcatattcatgagccctcatgaattatttgtgaaattgaaatgagtaaacctttatcttataggaaagcaattaaaagcacttgactcacaagatgataaatcaaaactgaaaattcagtcctctaagcacacataatttgaaaccctgcaatgagaagtaacacattgtgctagattagacttccccgtgtaaaaaagtatatttaaaatattaaagctactattctagatcataaaacattccagtgtgggtaaaggtatagcacattttaaaaagctaagctgatgggtgatttaaagtccttttggacaacatattatcttctgacatagctgctttctgaaaacctaaaaggttttatatttttattgaaatgcctaggtaacactgagaaccaagaagattcctccctcaggcaagaagagtttaaatttactcaagctgcatagtagaaattaacaagtgatgcagagcacaattatctttctattgcatactgtacgctagtttaataatcaaatgatacataaagttgtcaaaaagcagtgaatttaaaaacaggaatatataatttaagtaaatgcactgtaaaaaaacattgattatatagtattctatgtggaaaaaactcaaagctacactgtaaggttaaaattttatataaactagtttagcaaatggtattctaataacttcccaacctggcaatatatttttctttctttttctctgctcatgagtatgtacagaggtgattttttttaaacatgaaaaacatagattttatgtaaatgcacactactcctgggaaaacccttcgggtcttcttattgtcctattgccaattacatcttagtgatatttctctatagcattaattgtcattgtttaatattctgtttgaaatattctcagatcttctttccaagtgtttgtgtccaagtctctgtgtccattttaagatacttccaggatctgaattatgttgttaatttcttttatgttgcctctttcttttttcctaacaaactctttcctgctcaaacctcctatcatcttgaaaaacaaaaatcctgccttgttcagaaagcttcatataatgaaagtgtatttatttttaccagcttcatcaagcaagccttcactaaatatcgatattttatgtgagcattatagcttaagacagtttgctctacttaagacttttttattttataaaaatgggaaaagatatgagaaatcaattgaaattagacaaacttaaaaacaccttggtatattggggagataaaaaccttgtaattaggttcagaatcatggtactactaggtctcaagagacctgagtcactagatttttaaaacctcagtttcatcatttattaagtgatacactaaagcttaaataaggcaatatatagctagcaatttatattgtagagtactatgaaatgtaaggaagcattataagacagaatgcattattgctaaatgacagctgagatagtggagccatcttatctcaacactagatgctgtagatgttgacgctgtttattcctagcaattcatagatggataataaaagaacattacattcacaacatggaaataattgactaacaagacgataagaagagagtagacctagatgctcttggctttaggcatgaaattcccacatacctggaagaccaaggccacttctccacaaatctgtctaattctgaaaacgaatccactcagcgtttcataatctattaatcaaatttaagttactttgtactgttggagaagaaaaatacatttcccctgagttcataaagtattcttttcaggagagagcattttcttgatgttataattaatgtagtctgcctgctgtagctattcaaacattcttttattctattttttgccccatggcatttctctgactactgttttgtacattatgggtaagatacattgcataagactgcatactcataaaaacatggatttttttttatcatacttttagccttacttcatgttctgtatctaatttgtctaaacttatggtgtaacctcaatttttctccaaggcattcaacattatttgcaaaaagattcagttagatttattgctataggaactcacaaactgaataatatgagcaaaaataaatcacttcagggttatttaaatcttagtgcatttgctgtacaactgtatgtaaagaactgttctgggggttggacacacagagaagtgttgaccatctctgcccatgatgagtttacaatccagtagtttagacatcgttatggtctgagtatttgtgtcccctgccaccaaaattcctgtgttgaaaacctcattgccaatgtgatggtattaagagttgggggtcaaggagtgtgattggatcatgaaggcagagccctcatgggtgggattagtgcctttattgaagaagcgcagggagctgccttgtctcttctgccatgtgcagacagaaggcaccatctatgaaccagaaagtgggccatcacaagacagtgaatttgcaggtgtcttgatcttgaatttcccaatgtccaggctgcaagaaacaaatttctgtttagatactccatttatattttgttgtagcagcctgaatgaactaagacagacattattgtgactctgagggaaattgtggaggaaagagagtggtttacggaaagatgactttcactatgttgtgtcaaattatttggagaccagtgatactgaaggaagagaaatatgatgatgacatagaggggtttcaaaaggtaactttatgtcatctgcccattagattgtttaacgcttatgcatttcttcatatttttaccacatgagtatgtatagatgtcaatagaaatctcatttctaaccatgaaaagtgaattttgagtcccaaatatacattttagaagtacaaacttatgttaagtttataatgaatacagttgccttagaaggtaatagaatattttaaataatgtaaatgtatatgtaaataataccatcctttaaaaatatataaatataaaaatatatataaaaaatactttaaaaatactttaaaagtattcctacataaaatatagttttgtttacatttaatatttgtgagagtcattcttgttagtgctgatagttctcagccactcatttttatttttgtgtgatattccattgtaggattgtcgaatgcatgcacatattaaaatttgaatattaactattgccaagttgttatccaaagtgatcgtaacaatgtttatctcaattcacagtgtatgaagagttcttgttatgccttaatcttgctgatacttggtatagtcaaacacttaattttgtcaatataatggaaatgacttgtgaatttctcttgagtttttctcttctgttggagttggcagacaggaatcacatttctcttcataccttttgctcaattttctattgggttgactttttcttactaagttttttaggaatcatttttactgtatattcttcatacttatgttttggtgattatacacattacaatatttctctagtctgacatatttttccattgtgattttttgtacagaaatttaaaatcttaatgtgtttgaaaatttcagctttttagtttttaaattttaaatttaagtttaaatttaagttttaaaattttcagtttttaaataatttattctatttgcattaagaaatgttttcttaaccagtccttataaaaattttgctatattttcccagaatacaccgttttgctctttatatttacattttggttgtaatatgcagtatcaaactaattgtatttttttatctgaataatacagtcctaagaccatttgctgagtaatccatattttcccactaactataatactattgctgtcatataccaagttttataaatgtctgggtcattttctggggtttctattttattttgtgtcatcttatttttgtgtcacttaaaacactttttaaattactatagatttataataatctcagtatctgccacatcagttttgtatactttgtcctatttcaaaatattcatgactcaacatattgtcaaaatctcaacaaaatattgttgtgggttaaaattttaaattaattttgagataattgatatcattattatattgaggcttcttatatattaacacagtatcgctctatttaatttttttcttatctcttttagcaatataattttatccatatttaaatcatttataagatctcttaatagggttcttatggttttttttaagtttttattatttctgtgaatgaaaattttttaaatcaatacactttactgtaaaaagcactcttagtttttgtatgtagatctattatctaaaaaccttgcaattatttataacttgtatacaaattatcttgaatttttatacagaaattttcatcatttaaaaataaagagagtggtattacttcctattatttccatatttcttgttgtatatctttcttgtcttttccattagctaaacctttactacaatagtgaatattagaagtgatggcagatatatttgtcttattccagaataaagggaaatacttcagagttttgccattttgtccatatttgctatcattttcctcctacagaaatcctctatcaggttaaaaactaaaattatttttttcgtattccctgtttgttaggaatttttactgaataatttttctgcatctaaataggtagtatgttttcttgtttactttctactatttaatgtgatgctaatatgaaaatagatctgctaagattcaaagatctttatatttcttgaataaatcttgtttatcagaatgtgttttgttgttagcacatgcagaaacaccacacatgcatgcacacacacacacacaccctgcaataatctccaatttcttaaaatccatgtgtagaagaagaaaaatgagaaaacaggcttagtgtcatccataatcacatagaacaatcacattgctcgaactgagaataacacaaaattccctggatctcaagtgtttaaaaaattatggatttattttgttaaattaaattaaatttgtcctaaggctgcctttgtactttgaatccctacagagtaaactgcaaactaacttagtatgtaaagaaactgcaaccttaataagactatattcttgtaacaaatagctgagtctcaattacagtagccaagcttcagccaatcacaggctgccaactgatcagaccatgttcacagaaagcaaatgcctcatcacaccatgtccaataaatgcaaatgcccatctgtagccaatcaagctatttctgtacatcacttccttttgctgtctataaatactgtcctgcccatgttgctgggtggagctctctgaatctctttttgttctgaggctgcccagttcatgaaactatccttgctcaaataaactctgctaaatttaatttgttttaatagttcttaacaagagattttattctaacacaacacatactgaaataatatggcccaaatagtttaccacatgggcaattcacatatttggattaaagtacacacactcagtttaaaaagggaaagaaagagaaagaaaatattttgaattgtgtagtgaattcttcccatgaggctattcaataaatatattccctaaaacaaacatgatgggaaatgctaatgtcctagtctgtttgttattgtcaatttccccatagtctcatagtctatgcatcttactacattaaattgtgtttaaatatatatatttttcataaaacatggccccaagtcaaatgcatcatccagtgcccaaagaggcagaaacttttttcttcaatactagaggaaaaattgactatgctgggcatattttaaggtggactattgaactacatttttgtacctttctaatgggtatttaaggataagttttacagctgagttttcaacatacggaatggttttagaatcttatgaaatgggagagttcccttatccccctcacaggatgtgcgacaagggtgtggcttacttgtttggtgcctccactgctcaaccctaggggagcatgcagacgggcagatgcagaggtcgtggggagcattttttggttctgaccccatggcagcatctaggggtgagtgtttacaactcccaaagcctaagtgagcctgtgttacagtgtgctctttcagctttgctgtctgcaggcagcttgtgttaatcagctcaattagaccttctgccttattacaaggacagagggctttctgtatcccgggttcttgccctagtgtactggaaaaatcggatcacatgtgggcttggaagatgagtgcaagtttttattgagtggtggagttagctctcagcaacatgactggggagttagaagggggatggagtgggaaggctgtcttcccctggagtcaggcagcccagcagccagactctcctctgattgccccccggccgaactgccctctgtgtccatgtggttccgccatggctggtctgtcagtgtctgctggtgtcatcagtgtgttctcctcctctagaggtccagccaacttgtatgtgtgcctgctaaggtctcttgggcacaggatgtgggggcatgacaggccaaagtggtcttggtaaatgcaacatttgagcccgaaaacccagagtgcctgttctcacttagatccatgggcacaggccccagggtggagcccttgccagggacccgccccttctctacccagcacttccctgtccccctcccatatcacctacacagtgactttagcattagaatcacctgaaaggcttgttaaactacagattgctgagccccatccccacatattctgattcagaaaatctggtgtggggcctcagttccaaagtgattctaggaccttctaacaagtttccagatgatatggctgttgcttgcctaaggaccatcctctaggataaccactgactttaaaaaggggtttacgttttctttggatccaggcaagctcaatttccactgaatgttgacagtgtttgtttctttgggtggggaggtaagaagcaaggggagcaatttagcatgttttattaactgtcacatgataggtgttttagaataaactggggactgaaattattctaattcaactatagccaatattctttagtgcctactacaaaattttaataaacttcctagccatcaactgccaaaagtcttatctttcttgtagcttataattaacagtttaagataatgttatcaaccagggattgttgacgcatttcctttctccatggttaaaatacatagagcaaaaccattcttttgacaatttaacattttggctcagcaattcttgacatttgttttgcattcggaggcaatgatataacctctttgctgtggcatgtcagtttttctgagttatccttgccagaatgcatttccaggttttgatgaaagatttgctcttgaaatcagttatctttcttcttgcttatttttttcaagacagaaatacctctttataaataaataaataaaccatcagaattttatcacaatctgaaaaggtcatagagaaatctgaagaaagtgtttaaggattcatcataccattaaggtatctccagtctagcatcttgcggattcctttaagaggaacttttatggtcaaatgacgtctggtccataaaccatttttcttatcctgaaggttgtggaaacacaaaagtttatataaaagaacaaagattttgtttctttgataaagtcatggactgcagaataccatctggcttatataattgcttgaaatctcattaaatgttaaacagataaagtatttcaaataaattaataaaaagctccagtttctaatttagaaaacatcagtctgaaatttgtaatgatgaactgattaacggaagacaattttaagcagatttatgtgacatctatagctatagtctaaatattacaaaaatgaattctctcttctttcccttagcctaagttatttaagttatttttcttttctgaacatgcatatgctgtatctaaagttcccagtaagtgtttgtggagtagatgagacaaacagtaccactaaaaagcctctggacattggtaaatattaagcttgataagttgtaaagatttcatttttacttaaaccaactttcaccaaatagtcccttctgggaggctttcatactcagcctgctgaaaaattttgaactgacagtgggttttatttgtttattttgcatctttttctactgaaaatctacttattcactttggaaagttaaccattcatttggaaaaaaaaaaacaaaacaaacaaaaaaaacaatgtggctgcatctacccaaagctacatacatatgcttactgccttgtcattcaatgcaaagtagtttccataacaaccgttatatcaactgaatgcagggagtcctatttttttctaggccatgaaagcaactttctaaaagagaacacgttaatatcttctcctcactatattaccctatcaaactatttggtgaaaagcaccctgtctctataaattaacatttctgctggatatctctttcagaattcacattttcccttattcctttgtttaagtatagtgtggcaacctctccttctgctgggtctgaaatcccccttgtcagaggtcagctctggttcaatctctggtgaggaaagaaaagtcacttggcagtctgggctccagacagggattttctaagcaatctttttgtttatagctctggttccaaccacatccaagtcttcagaagtacctagtaactccaattcttaaatttttcctaggctgctccaatgtgagtttctcagaactacaagcattgcatttttaacaattgtcttctcttaaatcatttgccagccttctaagtccttccatctttatatattgtcttttagatttacaaatattatctgattttacaaagacacactgttcctatttctcattcttgttcaatttgggtaattttggggagaaagttgtgaaaatgtcttttttttttttttttttacaatcttgaaaccacaagtcctaaatattcaaatgaaataaacatggaatttttgccctctatcttataaaagtagtaaatttaataataagttctcatgacatatttaaactattttgttcacagaaatttggggttaaaatcacagtgattctgtaaattaaactgatttatacttatgcttgttctctaagaaggttcttagttggatgtagctcctattccataccatcttcatcttaactttcaaatctagcatcagaacaaactagatttattggctcattaaaaaaaaaataagattgaatttgctgtgtatggaaaacaagggaacaaagactgaaattttaaaaagtaaagagaaacaatggcaactttcagcacattatcaaaatcatatacttttaggtaatagggaattccaatttctgaagcttgaaccaaaatttaatggctaagaaagaaaaagataaaactgggttaaattctgtcattagaattaaatcatagtcagtggagaagctcacacctataatcccagcactttgggaggctgaggcaggaggatcacttgaacccaagagtttgagatcagcctgcgcaacataatgagaccctgtctctacacaaaataaaaaattagccaggcatgctgatgcattcctgtagtctcagcttcttatggggctgaggagggaggatggcttgagcctgggaggttgaggctgcagtgagccctgtttatgccactgcactccagcctgggtgacaaagtgagatcatgtctcaaaaaaaaaaaaagaggtgggggaaggtggggggcaagaaacagattttgttcgattctgatctgttagagctctagagaatagtgggcaaaaccgaattgtgaatagcaacaataaaataagaagacttccttctttgtgatgtcggtgtttttaatttgtttacagctaactttaatttcaacatttcaagatcctggaactgataaacaaaaggtcaagcctaggacacacttctcgaagtccctacatgctattgttctatttaacattgcataaaaacacacctgaatgagctataggaatcaagctttagctccctttgcaagatgacaatctctggccttgagaagacttatgattttctccttatatggctcgagacaaaagcataacacagggacagcttggaaacctgaagatgaaagctaactgtgtgaatgaagtgttgctgccttagacaagataatctgcccatcaaagcaaaaaagcataattctgtatgcctgggatgtctccatatccaaggaaagaaaaggatctgaaagaaattgttgacattctgactacttaaagtagatgccttgttaaatgagatttctgctgagaccaggatgctctgtatgtgcctatcagttcaaaaatataatgaaaggaaagtgctctgtgtttcctgttgactttcatacccaaagatcaatttaatggaaaataaaaagcttccattcatgggatacgtctttgtattaaaaaggattaaataaagaaagtttggaactttaggagctattagcattattatgtgtgtgaagaaacagtgagtccccaattcactcctcactttaactgagagttcctttctttcccgttaaatgccaaagtcattaattcatttcgtattgagcataagttctgaatttcagttagcatagaaaaaaacgataaatctaataaaatctcataaaatgttaggaagttggggggaaagcaaaagcagctataatttttagatattcattcaaaatatatgttattgaagctactgtccattttcacataatatctaattttttaaattattcttttattctatgtgtattctgatgagtcttcactaacttatggtattatcgagcataacataggttaaaatactgttgacagaaagagtcaaactctgtaaaatatgtgaagagatttattctgagccaaatatgagtgaccatgacctgtgacacagccctcaggaggtcctgagaacatgtgcccaaggtggtaggggtacagcttggttttatatatttcagggagacatgagacatcaatcaaatacatttaagaaatacatggtttggttcagaaaggcgggacaactcaaagcagtgggttccaggctatagataaatttaaacattttctggttgacaattggttgagtttatctgaaggcctgagatcaatggaaaggaatgttcaggttaagataaaaaattgtggagaccaagttttattgtgcagtggaatctctcagcagacttcagagagagagaccatgttgtaaaatgtttcttttgggacctaaaagggtacctgtctcttagctgatgatctcctgaatctggaaagaaaggaaggaaaacaaaggggaaaggggattctctataggatgtgggtttttcccacaagaggctttgccaggcaatttcaaggtatggcaaggaaatatattttggggttaaatattttttccttgtctcataatggtatgtcagagtcagattaaaaagtaagtcacgatatatagggtcaaataaaacccatcagatgagaattcatgatttgtagggcatgacttactagaccccttaggtaggaatttgggcaagttaaaaaaatcagagcttagtcctcaatacctatcttaatttcctcatgcaagcattgctgtatcctttcttttctttttctttttcttttttttttttttgagacagggtctcattctcttccccaggccagagtgcagtggtgtaatcaagtctcactgcagtcttgaccccctgggctcaagtggtcctcccaccttagcctccctagtacctaggaccatagccatgcaccaccacttattagcctctcctggagaatttttaaattttttgtagagatagggatctcaccatgttgctcaagctggacatattttaataaactgcaggtgtcagaagagagaactaagaaattttgataatttcatatcagttaagaagataacatgtttcaagaaatactatttgctccactatgtgtataagtgtctgctgttagccacgattcattgggatcttattgcatatctcagatgtcgatatcgcatatctcactgagagtacctttcagtttcccttatgttggttaatgtatatttctcaacctttttaccagaccacaccttcccagaaagcaaaatcctaatttgttttttcttggtggctactaattttctaccgtagtacccagcacctaacattcactcaattgtgtttttgaaatacataaatgatttttatctaagctcatttatttttaaagtacttttctaaaaatatgtcttttaaaaaaatccagtgccaaagggaaaaaaatttaaagtttctttggttaccttggcagatcatctagatgatttgcatcaatgtcatctttttgttatactcattaacgcggctgttcttagcatgaattataatgatgaaggtggtaataacaactggaatcaaatgttttttacagtagagaaagctttcagtcacattattccatttgatcttcacaaaatctatgtgttggcagagtggtcactgttattcatattttatttatttatttatttatttatttatttatttatttatttattttgagacagagtctcgctctttcgccaggctggaatgcagtgacacaaccttggctcattgcaacctgtgactcccaggttcaagtgattctcttgcctcagcctcccgagtagctgggattacaggtgcatgccaccatgcccggctaatttttgtatttttagtagagacaaggtttcaccatgttggccaggatggtctcgatctcctgacctcgtgatccaccagcctcagcctcccaaagtgctgggattataggcctgagccactgcgcccagactttgttattcttattttacagttgattaagtgaagaccagaaatgtcaagtgacctgtccaagatcacataaatagcaagtgcggatgctgggagatttatattctggtctttctgattccaaaactctatgctaaatgcagattagtccccagtttacaagtgcctgaattgtaaagccttcttcaatctaaaaacaaacaaacaaaataactaacacccacatgagcacagaaatcaccagtccacttgaccacatgactataggacactcttaagccactgaacctcccattccgtgtttctggtacctaatggagaacagaaagcttgtgctttcacaaattgcctacggcttgctggagtaaaatcctttaaaaatatattctgttttgtggaaatattttcattgcctccttttggtttgtgtttgtttgttcatgcatctttaatgagatgaggagtactttgcagccatgctgcataattttctaaattatcacaggttaatttattcctgaatcacccagacgttctggacaaagaaatgccttcagcaagtaatgtcaggcaccttctagagaagagtacgtggagggaccaagtggaagcttcttcccatctttttttctctagggccttcaacttttcaattcaatcccttccctgccttagtttgtagaagcttctttcgaagtcttctctccatgctcaactcttgtttcacccattacagtctatttagcacagagcaaccaaggtgattcttttaaagcaaatctaaatacataaaccacttgtccaaaatccttccagagcttccaattccagttacaataaagtccaaagacttgaccttgacctccggcgccccacgtaatctgccctctgactgcttctccagtaccgctctcactcccacactgtgcccactcagcaacagccacactggcctgctggctccttcttcacttgccaaatattctctcacctcaaagcattggcttctttctgcctcaaacaattttcccttagctatttccacagccgtttccctcacattattcaagtctcatattatctcatcaaggaggccttcccccaaattttctatatccttacattatttatatattttttcatagtaccaattgctacctaacattgcattgcatatttatttacctatttagaaaatattctgccctagaatataaacttgaagtcaggaaatttgtgtattagcgactgctctattctcaatatctagaataatgacttcatatagtaagaactcaataaatatatgtcaaacacatgaaatgaatcagcaaataatatctcagttttgggggctatcattttgcatttctctcaagatattctaatgggagggtatatagggtaaatgaggatgcaacaagccagttggtatctaagcctaaaatttttcgtaacatcaaattcaatttcagaattacttaaactacaactaaataactgtacacttggagctaaccaagttttttagttgatggcattcttatatagagcaaacttttgttgagtattatctatgtaccaggcacatcatatagaaggtaccttggacccatactgggaaagcaaatatggaaaatgtacaattggttttctcaagggactcatagtttagtatcagtagtagtttattttagtagtagtttactttgtggtgatacttttatttgagaaataaagaaaggaaggaaaggagagaggaagggaccagcctatgttattctgtaagaaggatttatagatagggtaggaaaagagttcaaattaggaaagaaattgaaaatgtatgacatcagcttttagaaaggtcttgtcacatactatctagacaatattttgtttttgtgtggcatgagaataatttttattagatacgttataatattttataaatgaatatttgccaattataggaaacttgtctacccatatcctcttcaagtaaaatttcatgttccctgaaatgaccctaataacttctagaataagttgtgatatacaagaacacgtagctactatttctaatggtgatcactcatcagtttcttacccactgataaaggaacaggaaatgtgatcatttcatgtctcagtcataaaggtgcttatattgttttaattacttgttaacattttttatcaagatttcaatttttaatagaaacaatttttctggtttactttttgttttttattttcagtttctaagataccatttagcatacagtgcacatattactcattctaaagcatgtaagtatctcacctccctagcctcacccttctgaatgtatgttttgaaaatagatcaactttagcatttcttaccatgaaaaacatcataaatggataaaattataaagtaactttagcctaaattctgttgttttccattctttaatatgacttacaaaacctgaccaggtctatcgtctattttattatcctagaccagtagaattgagcatcaaccctctttaggacttggcagtctagatgactgatgaaaaaaccaaatgtgagttccttttgtggttaatgatattgctatatttctataccatctgttgcctcttctcctggaaaaaaagaacccatctcttcttaatcttcacggagatcattcttaaaatttgttggatggtctatattactaaacttcacttctatgtccttatattcccagagccaatcatttctatggaattagagcccctaagacttaggaaattcatttactatctcgcttaagatgaaaagtaaatcctgtaagttcgtttttgtttgttatttggttctggatttttagcttcgtattctgtatctttttaatgcaataagctaatccgctgtgtgaaactggttcctatttggctatatactgaaataaaataaaaattttattactttgaagtaaatctctcctggaaggcttttcagaattgttcactaattaataaatgttagtttctgaaattgcagtgagtacccaaatacatattaacactcttattttcatcataatggtcttttgaaataggcatgcatgatattctgtaagcagggctgagcatattaagttattttaggagaggtaggaattgatttattaagcaaatatttattaaacctaaattctacagtaattcacatgacattaagcatgaagtaatagttgatggagaatgctagtatggctgccaagagaaaagcatacatagagttttcagcaatgtacagccattccagaaggatacaagcaaaacagaaaaacagtatgaacacaccacattatagaaaaccaaaatcttttacacgaattaactattgggggacaattctttgtaagtctctcacatttctgcatggctgttgagcaaggacactaactgcccttttattcttattttaatatatttatttatttattttgagatggagtctcactctgtcaccaggctggagtgcagtggagctatctcggctcactgcaacatccgtctcccaggttcaagcgattctcctgcctcagcctcctgaatagctgggactacaggcaaatgccaccacgccgggctaattttagtatttttagtagaggtggggtttcaccatgttggccagcatggtctcgatctcttgacctcatgatccgcctgcctcagtctcccaaagtgctgggatttcaggcgtgagccactgcgcccagccctgcccttttattcttaactgtctttccaaggatgtttatgtagcaaacggccttggaagttaaagatagtgttcctctcaggagcaaggagcaggtttgcttagtgttcaacataataaaggtaatttctccttctgaaacaaacatcaggcaggtttgcttactgccgattatgaaagattctagttacctaacttagggctcctcagccatgaaacaaaaattactgcataatttttcatttagaaaattacataaggccctctgcttcatctcacgggacatgagagtacagaagaaactgatgtaaacatgaagctcatactgctttctgtgccgtgagcaataaaaccctttgtctctgaccaaagaatctcatgtcttgttaaaatccacaaaactatgccaagtttgttagcttgcaagtagggtgaaaatctttcatccttaacagttcttgacattaattgatatacatccaatatttacagttttaataaacaccactagaaaatagcccttaactgccctaattgttgataggggatttagaaatcacaattaattgttcttggaaactccgtggaagcttgctatcaattcatggaagaagaaaatcagagtatcatgccccattgtggagcctgaatttatactatttgcttggtctgaaagtcttatgtaagagtgtttgtatttttgaaaggagataatagagagaataggcaagatatcataaatcataagacagtagctaaaaattttccagaattcaaggaaaacgagaaattaaaaatgaaggaagcatgttgaatcgcagcttcatttgatgtctctgtctctcactttgccacagcacacaggccatttttcagtttcttaatccatttatgcctagtgttccattattggaacactaagcttgtgggagttatttatatcctactgcgcaaggtcatcgccaaggtctgatttttcacacacaaaatttgcaacctcagcataaatttaaatataccaagctctgttgcactctcaggtactctgcatgtacatttctctcctatctgcctggaatgttattatccttgctttttatagtgggcctttgcccatactttgagttaagtgatacctcctttaaaacttcttatctgaccactttatttaaaatagcctctttttgcttattctccactagtcgttttgtttatttccatgggttatggttactttagtgatttatgcatatatttgttattgctgtctctcttcgtgagagatgtcttatcttcacaggctccattgtatctctcttgtccagcacaagcctagcatgtagaaagccctcaagaaatatttgttgattgatacctaaattaaagaatgtaagcacttaattgatttgaacataaatataaaattaaatatgtaattatagttataaacttattacttatattttatataaaactataagatggttgaaaaagaaaattcccttttaacagactgtgacaacatgttaaaataataattctaacaaagccaattggtagcaggaagctatcaagaaaaatagcataagtgggataatttcaatagaaatagttttatttctgagttgataatttaaaaaatataaatgtaggcatattattggtaattaaacaactaactcccaaacagaactcaaaacagatacctgctttctaaattaagacagttacataagcacacacaaacacacacacacacataccctaaatatgaatgaatatgattatatagcaaaaggtaggaataaaagaaaatagtaatacagcactaaaactacaaaataagaacagaaaaaaaccagctaacattgtgtagacagaataggctattaaaaggaattaattctttaaaattgagtcaaagaacaaaactcaactatgtattatctaggaagcagttctaaaataaaataacccagaatatttaaaagtgaaagaatgagcaagaatatagcagagccatgacactaatattacacaaataaatattccaggcaaaaacattacattaaagaatcaattttatgtagctataactctcaagactctttatctaccaaacaatatagatcttgaaaataaaaatttctaggaaatattaaacatggaactcttagtaaaagatataaggaaagcaagaaaaattaattagtaatataaatgggtaaattaaaagattgaaagactgataagtaaatccagagctggctatatgactctcctccaaaaagaaaataatgatagtagaataagataaactatcaggtaacctaattaagaaaaaataaataaatatgagaaaattaaaagaattagaatacttttgtaaaaaaattgctaacaagctcaaatagtttaatgaaatcttcatagaagaaatgaatggttaaaatgagtcaaagaagttgagaaagttgatgaagccctcaaaactaagaaaactacttatttaaagactaccactccaagaaagattcaaaaatgattttttttgagacatggtctcactctgatgcccagccttgagtgcagtggcacgatcacagttcactgcagccttgccttcccaggttcaaatgatcttcctgcctcagcctcccgagtaggtgagactacaggcatgtgcaaccatgctcggctaatttttgtatcttttgtagagacaggatctcgctatattgcccaggctagtcttgaactcctggcttcaagcaatcctcccactttggcctcccaaagtgctgggattacacacgtaagccactgagctagtctaaatttttaaatatcgttattaaatagattatccttatggtgtttttccaaatcactgagaaagttaaatcactcttgattatatgattctatataaattattagaatttaggaccaaggagtacactaaaataatgatacaccatgacctagaaaggtttactcagatttaactaaggtgatcatataatttactggttacaccagaacctttatcgtgaaagaggtggctattaataattactctttcatatccaacaatcaacccataagaaattggtatttgctccaaattcaaaatgtgaacagaatccaatccagtcatttttccatattattcttatttcaactttgtctgaaccacattaagctctctcctagtttcctacaatagtccctccagtttttgttgtctttacaattgagcagcaaggcaaatccttttaaaatgtacatcagacctgatgcagtggctcacatctgtaatcccagcactttgggaggccaaggcaggtggatagcttaagcttaggagctcaagaccagtttgggcaacatggcaaaaatacaaaaaatacaaaaattagtcaggcacagtggtgaccacctacagtcccagctactcgggaggctgaagtgggaggattgcttgagcctgggaggtggaggttgcagtgagctaaggttgcaccactacaccccaggctgggcaacagagtgagaccctgacttgaaacaaacaaacaaacaaacaacaacaacaacaacacaaaactacaacagattatagccctttctgttcagaactctctgaagccttcctatataacttacagtaaaagtcaaagtccctttgaccaataaagttcaatattatttaaccccctcctcctgatttctaccatcacttctctccctctagttcactccactccaccaacactcataacctcactgttctttgaacttacgagttaatttcctgttttagggtcttagcagtggctttctctctgtctagaacgctttccccacaattatcagcctgacttattgggcttattaggatgtcagcttcaaggctttgtatgaatgtcaccttctaaatgaggttccctttcaactctatctaaattacatccactcaccccaactgcaccaccctacctgaattttcttatctatttattttctcctctgttacttacaacgttctaacatgttatttatttacttatatgtattgtttatttttgtctgtagctactagattggtgcaaatgtaattgcagttttggactatgaattttaaattaagctgaaacacatctttattaatcaaaataggaaccattacaaccaacgcattttggccaataagaaatacgtttgtttattcctgtagtgtcaaaatccatgctttgggatttgatgaactcttggaaacccattttctgcatcctgctggttatggaagcattttccctgtaaaaagttgtcaagatacttaaagaagtggtagtcagttggcaagaggtcaggtgaatatggtggatgaggcaaaacttcatagcccaattcgtttaacttttgaagcattggttgtgagacctgcaatcgagcattgccatggagaaaaattgggctctttctgttgaccagtgctggctgcaggcattgctgtttgtggcgcatctcatcaatttgctgagcatgcttctcagatgtaatggttttaccaggattcagaaagctgtagtggattagaccagcagcagaccactgaacagtgtccatgacctttttttggtgcaggtttggctttgagaagggctttggagtttcctctcgatccagccactgagctggtcatcactggttattgtataaaatccactttttgtcacacgtcacaatccaattgagaaatggttcattgtttttgtgtagaataagagatgacacttcaaaacaacaatttttttgattttcgctcagctcatgaggcacccacttatcgagcttttccacctttccaatttgcttcaaatgctaaatgactgtagaatggttgacagtgagttcttcggcaacttcttgtgtaattgtaagaggatcagcttcagtgactgctcttgattggttgttgtcaacttccaatggctggccactattctccttatcttcaaggctctcgtctcctttgtaaaaattcttgaaccaccactgcactgtatgtttgttagcagctcctgggccaaataggttgttgatgctgcgagttgtctccactgattcacgacccatttttaacttaacaagaaaattttaacttaagaaaatcactcacatttgctttttgtctaacatcatttccatagtctaaaataaatacaaaataaacagcaagtcataagtcattagccaaaaaaataaagtgagaaatgagcattaaaatgatgtataacataaccacttttatttaagaatatgtttcaatatcaaatgtcaaatttcaacaatgcaaaaactgcaattacttttgcaccaacctaatacaaggatgtaagtacctcaaggccacaatttctttccctttttttctcttttgttctctttgttctttttggctcacattagatggtcaataagtagtgttgaattagtggataagagttaaacattttctcctgaaaattttctataatttcaatttgactcattatatagcttctggttgtgaacatattattcagttttctcaaagacctgtctgataactccagtatctagatctcctatgggtctgtttctactgtccattatttcagacattcctgttctttctctgtatgccctgctattttttattgaagatctatctgaccttttcttatgaaaaaaattgcagaagtaatttgagttgctagatgatgttactttcctccagaaaagatttacctttgcccttggtaggcagttacatgagagaggcagagtactttcttttaggaagtgaactgattcaaaactaaacttcagtctttatgagagctggtcttttttggatagccattactcggaaatattgcccttcacaggtcccagctgaaagactggagtattttttcatgcccttcctccttggcaagtcctgaactctaatttttagcctgctgagcaccacaaggttgcccgaagttcttttcagttatccagcctctcaaataccttgctggaaaaagcagaattgaatatcgggttcatctacctgcactcccctactcttcaggattttagctctctaaatcatttcttccctggtatcactcaaatgctattcaacttttctagactttttttttcttatagcaagaagtttgaatgatataaggtaatcaccatactggaagcaggatgtcccaagatttactggctattcactagaaatctttgcataagaacactttacataaattttaaataatgcattaaatgtgaacagctatttccaacaaatttgtttcctgcttttataaaaccatacatttaaatatttctttaaacacttaaatcaagatattatttatataaagatgatttaccagattataagggctaaaattatttttccctcattggaaaaataagtaagcatcagccctcatgaaacaagtttttaaagtcaataaaagaacctttatactcacatatgacacataccatcttcataatagtagaccatgtactgcagaggaacatttcgcaatgtatattctaatcttaagagatatcttatcacaccacttgcccctccctctccaaaaaaaagcttatgttcagctatgtttgggaatttctacatatatgtacctagcttggggacatgggatatgtttgcattttaaatgttctgaagtgttatactttaaagatttgctttaaaaaaacaaacaaacaaatttttctaccttatttaagaagataactttttaaaaaaatatttactggcatcccaaggaagtggttttccgtgggacattctttaggtaactctgttctggaggaaacagaaaaatataacatagagtctctatcttcaagggatttttaattagttggagagaaaaatatattcatattaattaacctggaatatagaattcaactcactttacaagaaaccaacacaaaagaagtcataagaagtcatgattaaaggcgaacctgattacccagtcctttgtgatcaagtagggcatagtactaaaatatcaaaatccataccagggtttaactcaattagcattaagaatatgcaacaatgaatgtcaagtctctgaggtcaaataataggagaataatccctaaaaattgcagtgctgaaataatgttgtttgcctaccaagggtcacagtattttttatttattaacttggaaggtttagggtgctttctgcaaatctagtgcaataaaaatgaaagccattaaaatagtcttgcttccctgggtaacaaaccctggacattacaagatattcaaaaataacacacaacaggcttttcttatatttttctcattaactttttaaagcctcctgactttgtggaatcactgcagtaagttctaagtgatgtataaaatggaaaagaaaatgtaggctatcctgacttcctcctgggcaagaacacacctgggttttgtttgttggttggttttgtttttagctaaattactgtcagcattgttatttgcttctatacaaacattttaaagaaacagcacagccacacaaacatgcactagggaaacacataaaatcaaaatttcagcattcattcggatcacaacacattttacctactctgatctggtatttctagcttttattatctgttctctctctctctctcttcctccctccctccctcgttttctccctgtctttctccatcacctcacaaatcagatactccctcggccatccacaggcctaagtggtcaagcttgctttataaccaatcctttgccaagggatgggattggagagtctctgaaacagaaagagaaaagaatttccatgttggaaccaaaacagtggcatcataggctatctcttcattacttatgattcaagacaagaatctccatcatggtatttgtgatttcataaatattgatattcattgtcttccatgaaataaaaatgcattttgcctcttgatgtgtatagcagttagctaattatagaactttaggggacaggtggtgatagtgataggaggcagacaaatcctagacagatggggcaggtccccagtaaaaccccaccttctattcaaaaacagcctgaaggctgaaaggctagactgctggttctggatgaaacccgcaacccagagtgagaacgtctgttcctgtttgcccaccctttcctgattggttctttttgaataatgctttttaaataacagaatgttgcctttttaaatactacctatggcctgcccctcccctttctttgtccataaaaaccccactctcagccacactgggagagaaaccacctgactttgggtggctgtccacctgtgcatcacctctctgctgagaggtgttttgtcactcaataaaattcttctcccccttcctcactcttcgattgtcagcatattctcattattcttggacatgggacaagagcttgggacccaccaaacatgggtacagacaagtctgtaatatcatggccctctgccctttgccagtggagggcggccaccccatgcaatgaaagtgtggcagggttgagccagccttggagctgtagacaccagagcagggcaaagggctgacagagctgttaacatgccgccatctgttggggtgtggatgggaggactaaaagagctaattagaatgctgtaacatcccctctgggctttagggtcctgtgcatccctgcctaggcatcactatgtctcccttttctggatgctggggtataccagaggagtggcttgtgatatgcctggtccggctgcaagcaccatgcagagcctgctcctgtgccagcacttggagtgcccacttgggccacacacttgcttcctgacacaccccctcctgccaggagctgagagtgcagttgtggtggctgtgggatcaatgccagagtgccaccagtcacagtccaccaggctgagtggacagtgtgtctcctatgacaaacctgggcccaagcaagacctgggcaagggtgtcaccagccaggggtcaccagctgacaagtgactgagaaaaatcctgcatcagtggttcaatagtgtgtttttggccacaaggaacagaatagccatcaaaaaaagaatttataaacagtatgggctaatttttcccacataatgaagagtctatagatatgcaaatcagggtgggttaagtggctcagcgatatcagttatcaagattctgtgtcagtatctcttggtcttcagctcatggtcacaaagtggctgcagttgtgcaactattatcctcataggacaatatctaaaagtggaaaggaagtggcagcaatttattctctactaatgctttcattcaaggaaaaataaatatttcctaaaagttggtgtaaactgcttttctgtctcactggccagcattctatcttctgccatatttttagcctctatagtggtaggtggaatcttctggcaagaaaaaatgaggctggtcttcaagtatccaagagtgtctgccacaggaagaggaagaggaagaggatgtgctttccttcttgtatggactactgatcctgtttagagagctacacactatgcattttacttttatctgacattagatccattcttgttttggttccattagattaagaaaaacgttattgattttaaaagtttaaaaggtatgtttcacttattcattttttttaaatattatgaaccttgaatattgttgttttgaatgagtttttggtttgtttcaaacctccttggagcataaaggggagaggcaggtcataggtagtattagaaaaggcaacatttgatcacttaaaaagcattattcaaaaagaaccagtcgggaaagggggaacaaacaggaacagatgttctccctccaggttgagggtttcatccagaaccagcagtctagtctttcagccttcaggctgtttttggattgaaggtggggttttactggggacccgccccatctgcctaggatttgtctgccccctgtcaactatcaccgcctgtcccctaaagttctataattagctaactgttatacacattgagaggcaaaatgcatttttatttcatggaagacaatgaatattaatatttctgaaatcacaataccaagcttgaccacttaggcctgtggatgtccaagggagtgcctttatgtatacattttttgttgttctgtaaagtaagtccaaagcttttggctgatttcgaaagtatacatcaccccctaaaaatttagaatcatcagtaacagtgactgtttctaataattcaaggtatttgtataaactgttttaggacaaatccctcatctacattttagagacagcattgatacaataatctcattctgtttagattaatagtttcacaaattcatttttgcagttaactcccataatatttttgcttatccgtattatagaacaagggagaaattattgatcttcttcatgcctgaatccagaaaaagtcaattgacagtgaaaaccagagggtatttccatagtaaaatgtaggtgggaaactcattttttattttctttctgtaccttctctttcagctgttcaataagaacttactgagttcttgcagtgtgccactgttttatttcaatcgtttcatgaaactgcacacaaacataaagctctggtgacatttgtccaaggtcatacaactaacaagttttggagattcaaagcaggacacagacaccaagtccaaggttctttttacactgtcacaactagctttttttttcaagaagtatctagagtgtaatcggtatgcccaaacaaaaagaaaaatcttttctgacaatgctacatgttgattcggtataaacaggtggtaattcacagaattcaaggtaaatcttcaaaaatactttcaaaaatatcacttcagtgacaacattgcacttcacttgactacattaaaactcttcacattacgtataattggtaatatgggatacacatatgctcacataaccagaatcaaaaatcaaaaagaatttatcctatttttctgaatttatatgcataatcttaatagaatatagtataaaatatatagagaaataaaatattaaaattgtattttaatctgtaagaaaaaaatagcagccaatttttgtcatatttctattttgatcattgagttataaatttaattaaatgtaattgttcccatcaatcttgtgctatggataatttaaatcttcatttaaatgttaattgccagtaacatcaaagaaagaccttaataataacattttattctgctttaattttataaaattcaggatatttgttttgttataaagtatgatgtaagataatgattatgaaaaggtgaagatgaatataaatttctacaatagtcttcaaacagtttcacctagtgattttcagaagagtcaaatatactgttttcatgttagtttcaacaaatgaaacttgaaattcagatagttgcattcaagctgcaaaactcttcttcattccaaagaggaaatgattaccttctggtcttttcattagttatcagcaagttgctacagttagattagggatggatgaagaccttattttccatttcattctgtgttaacattatctatgcagtgcatattgtgtagttaatagaagtttaagggaaaaaggttaaatagatttataattttgatggactcagtaagaaacagtgctacagttgcctggtcagactgaaaatcaatttgtgagtatcaaaatgtgaactcatttagttccaagcagaactattgctaggccatccttggggagatgctggactattgttttcattaggtgcatctgggatgcctaagaataggttgttcttagaatgtgaacaattctaagaatctcatattcagccaagtggttctttcagcattagcgaagatagctcactgacttaatattgtgccaaagagaccaaggttcaagtacttagtaaaggctagtgctcaaatatttccgcttgttctcttgcacctttaccactgccatgagaacacgaccaggatggcctgatgaatatgaaaaatgcatgggtcagtggcccctgttgctccagcgaacagccagccaaatgccagacatgtgtgtgaccctagcagagaccagaactgcccagccaagttcagccttaatcaccagtctgcaaacttgtgaactaaataaatcttattattttcagtcattatgtttcaggatggttgattatgcagtactgagtggcagtaggaaacacacgctttgatcaacaccgtctcatactaggagatgataatggggattgattagaatcctatcattagtaccttcttggctgggggcagagggtagagaaagacaaaaaaaaaaaataggattttttttttgttctacttagcaaaagtaccagtatttatcttcttctattgaggatagcatgagaatggccctaacagaccttatacagaaaaacaaagctactacactacaagctgtcagtgttaaggctggacgaaccaaggcagagtcagtgttaacataaaagctaagagttgacaagggaagtaaaagagatacctctgatacaataatcctacaggcagatttgattacttcctattaaatgagcaaatgaggtcagacatattgttggtcagtacaattgccagatttagcaaataaaaatacaggatgctcagtaaaatttgaattttaagtaaatgacaacagtttattaaaattacatcccatacactgggcatgctgtgtattttccaggaatttgacttctggggagaggatttggggaatggagaactgattcagttttaaaattatacttttcctgtctctttctgatttttattttcttgttagtagcctaaggaataatgtacaaaactaccttctttgccatgtttgtagaataagtgatgaaccattactacgtatgaaggtagagttctgtatacactgtggatctagtagaaaaacctaagttttccagcccctctgccatctatgacgcttgtaaattcacccataaacaccatgacaaaccaaacactggggaaatccctctttccttatctttaaactacccactcatagctgacttggctttatacatagtccattcccaaacactgtacatatataactttttgcaaagttaacgttgtcttttcgtttttataattataaaataatacatgatcattgtaaaataaatcagaaagtaatggaagaacatcaagttgaaaagagaaaacaacacaaatatctacctctgaaataacaactcttaacattcaggtaaaaatccttcaactttcttcatgtatatagacaaatatatgtatgttgtttttcctcacacagaaacagaattgttatatactcctcttagtaacttgttagcctgacttaatatgttgtggatttttttcaatgtcagtaaatatacatttacaaccttgtctttaataactgcagtcagtgagtcaacaatatttattaagctcttactaaatgcaagacatgctgtatttcattgcatgtataccccatgatagatttaaccaattccctataatcaggcattttatgttgtttataattattcactagtataatcaagcttacaatgaatacgcttgtaagcctacaactcaactgatagaaatagatgggttcaggcacactagagaggagtaaatatttttggaaatgttctgattgtagcagggcagattacatgcaaattttccatttttatggatattatttgacattcaatcaatagactttgaaaaaactagtcaatcagtgaatcagtcagttctcttctttttattattcctgataccttttctttttgcctctggtatacttacaggtacaattatactcccatgagaaagcaagcaagagtatgagaaaaagcaccaataagtacattcttagagggttgtatccatgccagcattcaggcatgtacattctttcattcatgaaatatttagcgattgtcaaaaaagtaccaagccctattctggatatcacaaacaaaaggacagaatggctccttccaaatgttttacagtgtgatcagaggcacgttgcttaccacttccaaaggtctgttcttcagctattagagtatatggagactgccaattcctcatactttctctaatgataagtaaacatcctttgccattttaatacaataaataatatttgtataaaatgccattgtgactagttgtaggttaaattaaaagttgggataatgcaagaagtcataaaaataatagatgagtcacttagacatttaaacctatttaaaatacattaaggtgcctttattcctaatattttcctgtatgggcaaagttttcctattttggacctgtgtctgttaaagcaaatccaagtgaattacaaacacatttctaagtattattctggaggtgttgcaaaaagagatgtagttctaaataatatccattcaaacatttttaagggcaaataacatctttagtgggaaaaaaaggagtactacatacacatcctagcatgaaaaacattatttaaaagtgtaggctagtcacaaaattggttaaaagctggattaatcagcttttgatgaaaaaatattgtggaacaaacaatacgcaattcaatggctttgacaacacttcgttaattttcactcatcgctgctctgcgtgttagctacagctcagcttcggtgtgactccgtttagtgggactcatcaccagactacaggctgctggttggattcaggttttctgcatgtgtctccaattttgagacccagcctgaaggaaaactcagactgaggatcagtctggggcatgatcttctcatggtgagtgtcagacgctcaagagggcttgtagaaaagagccaaccatcttaaggccttacctaagaactgacaccctgtcacttttatccactttccgttagctaaaataagtcacatgggcaagcacaatgtcagtgggttggggaaatatagaggagaaatgaggtgagtgaatagttagtgaatataacatcatcactcatgctcattatcagctagaaaaattaaaaacattatcaaagacgggccagttaatgagatgtactacaaattaatacaaacatcaaacaaagtgttgcttcaaacaggctaaacataaattgttgaagaaatcctagaaatcctgttattagaaatcctacatggcaaaattttgatttctatcaggattgaaatctttctattttttttctttttaaataactgatcagatcttcttgtataaaccactcctataagtcaccttctatgatttttattttctattatgtgagaggggagagaaaatcaaaagcaatgtgaatgcatagtccttctagattcttattgtttctctttctcttatagtttatctcacctatatataattcaatatcaaccatttttttttcctaacttacatttagtaaaactttctatgcactcaacttagctttcatggaaacagcactttttttcctctagcagcatgtaattaaattatgtgattataatgacaagtattgctattataaaatggtttgagaacaaacatatagtatctgtgggacttaactggtaacagcagaaatgcactgctacttgccatagtgtttggttgtccttcctattaacacatctattatgttttaggatggaaatggagggctaatgatttagttttcatgtctttgattactaaaagagtcaaatatattttttaaacttgtattttaagttcaggggtacatatgcaggtttgttatataggtaaacttatgtcatggtgagtcaaacattttaaatatatgtataagccatatatatttctgaaggagtttattattttgtttataaatataaaatcagagtttttataatctagtaatttgtggcaatattacatatcaagctaatggaacgaatttaatgagcttcaaagacaggacatttattaaaataataacattcataaattaattgacatcaacatactatttacaaaaattaatggtttatacctaaatatatactcaaatttagtggtattattatgtggtacatgtcctgtttgtacataaattttggatataataaattttttgtgtacataagcttccacttatttcaatgaacattaatgtacattaggtatttgattagaacgaacattactcatcaacaagaaagtttatttaaaacccccagctccctcaattgcttggttctctttctctatctaaataagttgctctttccttttcctctaagatcagttattgggatcaaagcttcagtgattgtttaccttatgtgtaaacttttggatataataaaagttttgtatacatataaacttctgcttatttcaatgaacattaatgtatatttggtatatgattagaaaaaacattacttgtcaacaagaaagtttattaaaaaaaaaaaaaacaactccctcagttgcttggttttttctctctaactaaataagtattctttcctttttctctatgatcagttgttggatcaaggcttcagtgatggtttaccttatgtgtcaacttgactggaatacaaggtgcccagatatttggttaaagattgagtgtgtttgtgagggtgtttctggataagattcacatttcaatcagcagactgagtaaagcagattaccctgcccaatatgggtggcctcatccaatccaatgaaggcctgcagagaacgaaaaagctaagaaagttagaattggttctctgtttttctttgaactgggacattggtcttctgcattcagagtcaaattcaaactggaccttacaccatcagctctcctgattctcaggcctttagactcacactagacttataccatcagcttttctcagttcttatatatatcagacccagaaaagctgccagtgtttttggacaatgaagttcaggctgaggtggtcttggatgaagatgaggaacttattgggatatataacagctctgatatatatcagacccagaaaagctgaacgcctgagaaccaagagagctgatggtgtaagttccagtttgaacattatatatatatatatatatatatatatatatatatatatatatatatatatatatccgtgtgtgtgcatgtgtgtatatatatgacacatagtgagatgaagtatccctgtatgtgtgtgtgtgtgtgtgtgtgcacatatacatttgtgtggtgacgcagccaagccatatcattttatcccttgcccttcccaaatctcatgttgaattctaatccccacgtgtcaggagagggaactggtgaaaggtgattgaatcatgggggcagatttcctccatgatagtgactgagttctcacaaaatctggtggtttaaaagtgtggcacatcccccctcactctttccttctgccttgtgaagacatgccctgcttccccttcaccttctgccattctttatagattacccagtctgaggtaattctttatagcagtgtgggaatgaattaatacagaaagttggtaccaggagtgagatattgttacaaagatacctgaaaatgtggaagcgactttggaactgggtaacagatagaggttggaacggtttcgagggctcagaagaagataggaagatgagtgaaagtttggaaagatctgtggaactttgaacttgagagagatgatttagggtatctggtggaagaaatttctaagcagcaaagcattcaaaatgtaacctggctttttcttaaaatgtatgctcatatgcatgaagaaatagatggtgtgaaattggaacttgtgtttcaaagggaagcagagcacaaaagtttggaaaatttgcagcatgactatgcagtagaaaaagaaaattctggggaggcctcaggaaacttacaatcatggcagaaggtgaagggaagcaaggcacatcttcagaaggcagcgagagagagagagcaaggggagaagtgccacacttctaaaccatcagatcttgccagaactcagtatcacaagaacagaatgagggaaatctacccccatgatccaatcacccccaacaggttcctcccttgacacgtggggattaaaatttgacatgagatttgggtggggacagagagccaaactatatcagcccttaaaaattatgctaaatctactctatctctgttctataaatggaacaacaaagcctggataacaacatatctttttacagcgtagtttactgaatatattaagcccactactgagacctactgctaagaaaagaagattcctttcaaaatatttctgctcattctcaatgcatctagtcacccaagagctctgatgcagatgagcaaggaggttaagtatagtgttctttgcttgctaatacaacatccgttctgcagcctgtggatcaagaagtaattttaattttcaagacttattattttagaaatatatttcgtaagtctatagctgccatagatagtaatttctctgatggatctgggaaaattaaattgaaaaccttctggaaagcattcaccattttagataccattaagaacatttgtgcctcatgggaggaggtcaaagtatcaacattaacaggagtttggaagacattgactcccaccctcatggatgactttaaggggttcaagacttcaggggtggaagtaactgtagatgttgtagaaatagcaagtgaactagaattagaagtggagcctgaaggtgtgactaaatgctgcaatctcatggtaaaccttgaatggctgaggaactacttcttatcatgagcaaagaaagtggtttcttgagatgagatctattcctgtgaagatgctgtaaacattgatgaagtgaaaacaaagaatttagagtatttcataacttagtggataaaccagtggcagggtttaaaagaattgtctttaattttgacaaaagttctactgtgggtaaaacattaaagcgcatcacatactacaaagaaatattttatgaaagaaagagtcaatcgatttggcaaatttcattattgtcttattttaagaaattttcacagccatccaactctgttgcaaccaccaccttggtcagtcgacagcaatcaacacggaggcaaaaccctccaccagcaaaaagattatgatactctgaaggctcagatgattgttaacattttttagcaagaaagtattttttaattaaagtacgtacatggttcttttagacataatgctattacacactgacagtatagcataaacataactttcgtatgcactgggaaatgaaaacatttgtatgacttgctttattgaaatattcattttattgtgatagtctgaaattgaaactgcaatatctcccagataggcttgtgtgtgtgtgtgtgtgtgtgtgtgtgtgtgtgtgtgagagacagagagagagagagggagagagagaaagacagagagagagagagagagagatcctatttgtttgttttttcatggaaaacccagagtaatacagcttctttcaccttgctagagctaactcaaaattaaaagtcaagagaaggtttagagattttcttgaatcaatgatccacactcatacctattctgaaaggtagaatctattcctcctcaaagagggatgcaagtggcagatgtggaattatgccacatgaggttacttttcagagctccatctgacatttcttaatggttggtagcaaaattgagctaccaattcaatacacatttctctagagtaggaactagggataagctaattgataagctataatgtcaacctatttatgattttaaagtatgataggtttaggccagcctgaatacatttatatttcacctctcatagattatttttgcccatttctttattgaatgctgagatattaatatcccttgtgttaaaataggtccaatgaagtccaagctcagagagaacataaaaggtctgcaatttcaagatgggttgcaaatctttacataaagtagaaaaggtgattaataacaggcctaattgagaaatgcaatttttgtgctggggagcttcagatcacagactgttttttcttttttgtattcatcacaggcaattgaacctggtgaatgaaatgaaattaagttaaggggagaaaattggttccaaataaagtttaggaagcaatttctacccatgaggtaattaatgaatgaaacgggtttctacattagctcttgaggcaaagccattttaaggagaagccctcttggggaaagtattcaaagtaatctaccccagtggtcaagcagtagctgattttgaagtaatggcaatatggtcctttacaggcaaggggtcttcttgctcaatgaggtattaaacaaggtcatgtcttccatttgaacgactgctaccattccacaagaaaatagaggaaggataataaggagttttagaattgctttgcagtgatcttttgtgttttggctttaattacaaagtactgcatgtgtgctatattaaaaaaaattaagaaacataagtgcaaaaagcaaattatgagaagactcgccaaacatgcccatgcttgggtgcacccctcactttattttcagagataacaactgttctctctctaaatccagttctgtgcatttcttgacactgaaagtattctgaggttagggaagtcacacagggtagttttgtcaaaccttgctcctccctgtcctgcaggcacattgcttagagagaccactctggaggcttcagaaaagccaggaagctggctaagaaatctcttgaccctggctaaagaccaatgtttaagtaacaacatctaaaaaagagagacttttcctttcagtgtcctctgtggaaacttaatgatatgtgtctttgttatcactgcattgcaataaaaatcaaatcagtgtccagtgttgcctagccgtaaggaaatttcaagcaataatctttgaacaaaaaaattacttttcttcctctgtcttcatcagtttgtggtaattacatctgtcttgactgtctggttggcatttacttgtaatccagaataaatctttttatgtccagtatattttgagtttttctgcaaattatctgccaaccatcatcacttcacagggctagttcagaattcggtaaaaatattttgctgtaggagagttacttagcctcttattcaaaaaacaaacaaaaacatacaaaacaaaacagggcctttctctgtcacccaggctggaatgcagaaactccatcataactcactgtaacttcaaacccttgggcttaagtgatactgccccctcagcctccgaagtagctagtactacaggtgcatgccaccatgcccagtttttttttttttatttttgtaggcacagggtctcgctatgttgcctatgctggtcttgaactcctggcctcacacaatcctcccactttagcctctcagagtgctagaattacaggtatgaactgccatgcctggccagcttcctgattttatctttcttactctctgttctacctagtctcctggacaatgtttcccaaactgtggtttttagacccttgggaggcccaaaacatattccatgggttagaaaaatctctacaaaaaactgagttagatgttcactttgatgattaaaatataaaatataagtatagtctcaattgtctatataagtttataatcaagtatgaatccacaatttatgcctccatactttcttttgtgtttatgatcaagctaaaggagtagattctagcttggccttgactgagttagtaagcagctaattgatttcagagagatttacttggtgtcaaaatggcgataatcagtttatatctatcttcatcctcatattaactttttaagtaatagtaagcactaagtgttcttttgcaagaattattaataactaaaatacatttttagagaataagactagctctttaatatgttgagactgactttccattataaaaatgacattaggaaatgatgatacaatgtgatttgtgatataataaataaaggatttcttacaaaactagggaggaaggtgatggccagagaacacctctgaagtttaggcatgaagttcagtaagagttaactcttactccacgctaatctccatgttacagagatttggggcaaagcctgtgcaaaggaaacacccatgtaagatgtagaagtaggaaagcatgctatttgcacaacagtttatgcattttaaaaacaagaccttgtattagtcagggttctctagagggacagaactaataggataaatgtatatatgaaagggagtttataaaggagtattgactcataccatcacaaggtgaaatcccacaatagacggtctgcaagctgaggagcaaggaagccagtctgagtcccaaaacctcaaaaatagggaagccgactttgcacgcttcagtctgtggctgaaggcccgaaaactcctggcaaatcactggcgtaagttcaagagtccaaaagctgaagaacttggagtctaatgttcaagggcaggaagtatccagcacggaagaaagatggaggccagaagacttagccagtctagtctttccacatccttttattctgccttcactggcagtttggattgtgtccacccagactgagggtgggtctgcctttcccagtccactgattcaaatgttaatctcctttggcaacaccctcacagacacacccaggagcaatacttcgcatcctccaatcgaatcaagttgacactcagtgttaaccatcacagaccttattgattttatttggtacattatccaataatcatgtgatgtaggtaaagagtgtattgttattatccctttatatggggcaactttcactcatagaagttaagtaacttagcttgagtcatacgactcacaagtgacagtgcaaggacctgacaccatgacagtgctattttgctgggcatttttactagtccacattttctacttcagcacttgagatggcctgaagagcactccatccttccctagtttatctctgtcctggttatcttccaaccatgtaatggacactattaagtaagcaattatacacctcatatgctttgtgaattaaaaacctgttgaaaagttaatgatgagggaaatccaaaagaccaatatatatctagtgtctgttctgttccagcaactttaggaggactgagttggccaacggagatgcaccaagtcctgtttccagaataaacttaaattgcctctcatttcacttgttccaatctggttgctggtttgaatcctgttgcctctgtgcttggtccttgttctcacctccaatgcctctggtttagaagatctgttaaatactcactttctgacttaaacttatagtctcctttcagttcaattctagtactagtcctctggtttcctgcacaacgtccactgctctggctttcaggaactgaatgactaagtttaccttctgctaggggtgagtaatcaaagatgttattcatataatcaaacaaatattaaaaagtagagggacatacaacaactactgaattatctttttaattatacaactatcaacttggctagttggttttgattattatctaaaatatttctcttttcattcttatcatgtctggtgttacatattttagtaaacttctcacaaatcagcctggattctcactctgtatctaacttgaagccatactcagcattttgtaaaccaatcccctgccccagaaaaaaagccaaaagaaaaacaaaaacttcacttccacaagatgttagtgagtgttacgttttctgtaaaatataaggagagaagtggaagaaaattcaagtggtaagttatacagaaaaacttaaaatttctgattaaatacatttattctgttacaaaattgctccctagctgccagccatctattcaatttatcttctttccttttccctttctccctacatctgttcaaatcccttctattgtccagaaacttcttagaaagtagttccattgttatgcaatcatgagcttggggacttagtgctcccgagtgacttctctccaaactaaatttttaatctacagaacaaattttgggggtgggggttatatagagtcacaggaatgacagcagtggtggagttgattctagctgcacattcttttcagattttctgccatatttgataatatataaacactcaatatttttattaacttgtactaggattttgtacaggagcattcagatttaataataacaatatcatccactgcctagccaatgcaatagaacacagatggaaataaagtcatgtagcaggagttgaaaatctttctggaaagaatctttgacacattcagagtccttttaaacatattagtgagtttggttctcaaaataacctaatgaggaaagtagggcaggtggtgttatatctattatacgtgttgagaagctcaaggtttactaagttcataaaatagtgtgtgataaagtgggaaagctgaaacccatgatatctgtgggtctgatagtctcaggtagtcatgggcaccagtcaccaagttaatctggctgtttttctggacacagtaggcttatgctttttcaccccatttgatgataagctgtgtgacttgctttggccaatgcaacattggtgaacatgatgtatcacctctgggcaaaaacttggagagccatcatggattctccacattcctttccatctgccatggtgacggagaaagcatgggtcaaaatggagccctcttaagcttagccttaggtatctgcaataagaagggcaccactgtcaactggcatcattggacaggtaatttagaatttttacgacattttgtgaggttaagagattgattttggagttgctagttgctccagcataaccaaccctatcctgagttatatgcctttgacttctattcttactccttctcatgcaaactcttcacatggtgtgatgaaatagtcagatagcaattgggcaacagatctgaatcactgtgtttagtatctcgatgttgccctggctattactggtagctatagttaataaagaaaattatagtactctttatttatagtaatttttttttcctaacacaagagtgagaacttttgttgttcaccacctgccaatgggaaatacaacataattcaaggtaactgaaggtcacccttgaatcaccactgtggagaattatatccaaaatttgtgcaaagcattttcagtcacatccttagtggttagggcagcaaggagcaaaagaagagtgaaaaacattgtgttaatgctgaaaaacaaaaagcagagaaaaagattaatagtggtgattaaagaattagaaagcattttctccagaaatccaagctgtgcttggaataaaatagcaaaagttgagaaattcgtaagacaaccacaaatagaaaatgatagggcaagtgtgggtatgattaaggatgactccagaaacttcaacttagcattctttcttctttgccccttctcctaactcagtaaaagtagggacagttataaagccgatgaaaatcgggagtttgtgaaatgtctaagctttctatatttgcgtacagattcagtgcttgttataaagctgtttttcctgtgatttttctatcaagaatagtgagtattccaagatggggtgggtggtggcaattctaagtaaagtaagcagcctcaaaaatgtgacttgaggcttcatgaaagagttttgctttcactatgttttccaatgctaactcagggcatgaacacattgaggggccacctgaatatcaaaatttgagggggtaattaaggcctatttgctttcccaaagacaaaaatggtttatccttcttccttcatcatttctgtcttttacaaatgagctacctttaaacaactctctacactgaaaattgcaactatcaagttttcctctgttgaccttcttctgaaattgttatttctgttcacaggtagagttgaataagcagcaaagatatttctagataatcgcttctcagaatttaatgtgcatatgaaccacttggggatcttgctgaaatgcagattatgatactgtaggatttgggatgggcttgagattctgcatttctaataattccctaggtgatgctgatgctgtttgtctaggaacgatccatgaaataatatggatatcaagtctcagagcaggtaagtaacttacacaggaccacagcaagtaaatggtaaaaccgtgattagaagtcaaatctgtctgactccacatcctgtgctcttggtcaataatgtaatgcctccccatagagataggcaccgatgggacattctctgagaagaaagataatagcatgaagataatggattgctaagctacagaaaagaaatcagacatgtcagatgtcactcactttgggaaatatatgtcttaagctcacaaacctttaaattagacaatttcagccttacagaacactagctgttttcatagcttcacttcataaagtcccaccattcccccactgaaaagagacaataaaagattttataacacatgcaatcataatttggtgccagtacaacatagtctccatgacataaagttgcacagcaggagagcaagcccaaggaaagtatctaatcagataattaaccaggaaattgagagcctgagcattaagtgctactctgggggtctcctacagcaaatggcctctatggtgtattaacacactgaagcttgggtgaaagcttacttcggaggctctatgactcattctatgtttaatcactgctactctacatcagtagagtacatatagggagaaaagaggggcattaaaactcagtacaggcccggcctggtggctcacgcctgtaatcccagtactttatgaggccgaggcaggcagatcacaaggtcaggaatttgagaccagcctgacctgtctctactaaaaatacaaaaattagcctggtgtggtggcgcacacctgtaattccagctactcaggaggctgaggcaggagaatcacttgaacccaggaggtggaggttgcagtgagctgagatcacgccactgcactccagcctgggtgacagtgagactcagtctcgaaaagaaaaaaaaaaaggcctcactataataatggtaggagaaaaccgtaagaaatctcaagccaaccaaggaaaatagctccccaggttgggaaaacctcctaatatggataatgaaagaaaggccctaaaaagcgatagagatcacttcaggggaaggccaggaggaatcaaaggtaactgttgcaacttaacaattcacctaaagcaaagtcttaacttttctgcccttgattaacttttcagaggtttatcagtttagcagctccaatatgctattcgtctgaatctttctaaacccatgtctctcccacagtcccaacactccttcacataccacaatctatcccaggtttcatccctttcccatattctcattcctactcttccaccaaaagtaaaactctgccttcgttttcttctaagtccagcagaaagctgtgaagccttttctgattccaagcctctccaccttggtccaagccatcagaatctctaccctggactacctcaagagcctctaacttgtttctttgctttaactcttgccttccatgtggtagctcctgcacataacccaagcacaatcacattcttaaatgtaaattagactatgccactggcctgcctaaaaccctgctgtggtcttcatcctacttctcccattatactctgtagcatctcaaccctggttgcacttgagaatctccagcagaggctttgcaaaacagcaatgcctgggcctcatgccagactaattatgcaggatacaccatttgcctgatgattcacagcacagccaggtttgctggtctggcctgtgacacctcttggtttaatagtgctcattcctcctgatctttgcattgctgccaccatgtcatcattctgcctgaacatcacctccacacgaggctgtctctgaccacccttcccaggacctctctgttatagcaccttgaagcacttttctctgcttgaattttccttgcttactcatgctgtaacctgcattgtcctgtcagaaaattaagctttaatgacacagggaccccgtgtgtttttcagtatacctggcatagtgtaggcaactcgttcagtaaacatttgtgaacaagtattgaatgaattccccaggcagaactaatcacttcctcttctgtatcctcaaagcactttggagattgctccattaaaatacatcgcccatattttattcagttgcatctgtgcctgtttcctcgctagactgaaagcaacttgagtgtgggagctatgtcttattcatctttctatttctattacttagcattgtgctaaatatatgataggtgctataactaagacaccacctttcattatgaaaatcaaattaatgagtggtgacaaatcaaggatggtacagttcatcctggctcatcagtaacctcagtgattatttaaaacttatgcccaatattttttaggaggggaattttaagagagatattatttacagttgctggcacatgttgataataaaaagcagatggaccctcaattaggtttattatttattataaattttctagagacattgtaaccccttagtgcctacactcaaggctggtcaccatcactatcttgccttaggtacaccgctgtttataagaagccccaaaactctgatgaatgactattgtctttttctactaaaatctcagacaattaagaactgaggctcaaagtagaagagtccacttggctaagccttagcaaacaattacatgctcatctgaacctgagactctggtaaaccctaaacaaagctaattatctatatactataagcctgcagacactagaattatgaagataagaagtccaactgtgcaagagtaaaataatattatttgccacattacatttaaagaaacagcctggagtcattttctgtgagtgtgattgcatttattgtattggatagtttttttttattggaaaagtaatacagtgcttgttgtcacaaggcaaacaatataaaggtataaaaatatttgcactgtctttccaactctgcagtctaactctaatatcctaaggcaattcatgttaatttgcaatttggcatatatcatctgtgcttttggaactatagatagtgaggagatggatagagagaaagattgagatagagattatccagatacatatatacacacttcatattgttacaaaaattgggtcatctcattcacttttctttaaaaagcttactctcaacagtattatcttactcttccctctgggtcattacatacagatgtaactcattctgttgaatttatgtattcattcattcaacctatatttattaagactgtctacaggcatatgtttaggcactcaggtaaacaaaacaaacaaattcttgcttttaggaaatttgcattctaatgtgggataatgaaaataaacacataaacaagtaaactaatagcatgtcacatgtgatgttgagtgttatagaaaaccaaaagcagaggactccacagaaagggagtatagaagaagggctgctgtttttcataagtgaccagggaagccttgtgagcaaagaactgaaggacatgagggaaccagccatgcatgtatctggggcaagaccttcccaggcacggaggacagcaagtacaaataagattgccaaaaaatatcctagtacaactgttcttatgtattcaaatcttcttgaattattcatcaaaaggcatacatgtataaaacttacaccatccatgtggcaaaatctggttcaatataagactttcccgaccaaaatggaagccaagcttcctaagatacccacacagatgggagccaaagaggaagacaagctgttgagtcaagagacattgctacttgtccttctaacctgaattggctttggatataggcaaggaaatctgaagatgggtggatcctacttaaaaaattgctattattaaaaagtcagaaaataacagatgctgtcaaggttgtggagaaaagggaacatttatacactgtttgtgggagtgtaaattagttcaaacattgtagaagacagcgtggcaattcctcaaagacctaacgacagaagtaccacttgacccagcaatcccattatgggtatatacccaaaggaatataaatcattctattatgaagacacatgaacatgtacgttcattgcagcactgttcgcaatagcaaagacatggaatcaacttaaatgcctatcaatgatagactgaataaagaaactgtggtacatatataccatgaaataatagtatgcagccataaaaaagaaagagatcatgttctttgcagggacatgaataaagttggaggctattatccttagcgaactaacacaggaacagataaccaaataccccatgttctcacttataagtgggagctaaatgatgagaacacatgggcacatagaggggaacaacacacaccagggcctattggcaggtggaggctgggaggagggagaggatcaggaaaaatgactaatgtacactaggcttaatacctgtgtcatgaaataatctgtacaaccaacccccatgatggattcctactaagccatgtcccatctgtgagggaccccactggaaattggactgtccagctcacctggcagccactcccagagactgtagagctctggcctaaggctctctgactgattccttcccagatctgcctagcttagtggctgaagactgacgctgaccaattgcttcgaaagcctcctgaaccatcacagacgctttgggtaactcttacagtggaggataagtccatcctcttcttaatcaatatggaggctacccactccacattaccttcttttcaagggcctgtttcccttgcatccataactgttgtgggtattgacggccaggctgctagaccccttaaaactccccaactctggtgccaacttggacaacattcttttatgcactcctttttagttatccccacctgcccagttccattattaggtctagatattttaacaaaattatctgctaccctgactattcctggactacagccacatctcattgctgcccttctccccaacccaaagcctccttcatgtcttcctcttgtatcccgcccaccttaacccacaagaatgggacccttctcttccctccctggcaaccaatcacatacccattactatcccattaaaacctaatcacccttaccccactcagtgtcagtatcccatcccacaacaagctttgaggggattaaagcctgtccaggatctttgtcttgtcaaccaaattgtcttgcctatccaccccatggtgccaaacccatatactctcctatcctcaataccttcctccacaactcactattccattcttgatgttaaagatgcttttttcactattccccttcaccccttatcccagcctctctttgcttttacctggactgacgctgacacccatcagtcccagcagctgtactgccacaaggcttcagggacaggcctctttacttcagccaagctctttctcatgatttactttatttccacccctttgcttctcatcttattcaatatactgatgaccttctactttgtagcccctcctttgagtcttctcaataagatatcctcctgctccttcaacatttactctccaaaggatatcaagtatccccctccaaagctcaaatttcttctccatcggttacctgctttggcataagtcttcatgaaaacacgtatgctctccctgacaatcgcgtccagctgatctctcaaaccccaaacccttctacaaagcaacaactcctttccttcctgggcatggttggatactttcacctttggatacctggtcttgccatcctaacaaaaccattatataaactcacaaaaggaaacctagctgaccccatagatcataaatcctttccccactcctctttccattccttgaagacagctttagagactgcccacacactagctctccctgactcataccaacccttttcattacacacagccgaagtgcagggctgtgcagtcagaattcttacacaacgactgggactgtgccctgtagcctttctgtccaaacaacgtgaccttactgttttaggatggcctcatgtttctgtgcagtggccgctgccgccctaattcttttagaggcactcaaatttacaaacgatgctcaactcactctctacagctctcataacttccaaaatctattttcttcctcacacctgacacatatactttctgctccccggctccttcagctatactgactctttgttgagtcttccacaattaccattgttcctggcccggacttcaatccagcctcctacattattccggacaccacacctgacccccatgactgtatctctttgatccacctgacattcaccctatttccccatatttccttctttcctgttcctcaccctgatcacttttggtttattgatggcagttccaccaggcctaatcaccactcactagcagaggcaggctacactatagtatcttccacatctatcattagggctactactctgcccccctccactacctctcagcaagccaatctcatcgccttaactcgagtcctcactcgtacaaaaggactgcatgtcaatatttatactaactctaaataagccttccatatcctgtaccaccatgctgttatatgggctgaaagaggtttcctcactacacaagggtcctccatcattaatgcctctttaataaaaactcttctcaaggctgctttatttccaaaggaatcgggagtccttcactgcaaaggccatcaaagggcctcagaccccattgttcaaggcaacaattatgctgataagacagctaaagaagcagtcagcattcctacttctgtccctaatggccagtttttctccttgtcatcagccactcctacttactctcacactgaaatttcaacttatcaatccttccccactcaaggcaaatggtttttggaccaaggaaaatttctccttccagcctcacaggcccattctattctgtcgtcatttcataacctcttacatgtagattacaagccactagcccatctcttagaacctctcatttcctttccatcatggaaatctatcctcaaggaaatcacttctcagtgttccatctgctattctactactcctcagagactcctcaggcccctcccttccctacacatcaagctcagggatttgcccctgcccaggactggcaaattgactttactcacatgccctgagtcagaaaaataaaatacctattcgtctggatagacactttcactggatgggagaggcctttcccaccgggtctgagaaggccactgtggtcatttattaccttctgtcagacataattccttggtttggccttcctacctctctacagtccgataatggaccagcctttattactgacatcacccaagcagtttctcaggctcttggtattcagtggaatcttcataccccttaccgtcctcaatcctcaggaaaggtagaacagactaatggtcttttaaagacatacctcaccaagctcagcctccaacttaaaaaagactggacagtacttttacttgcccttctcagaattagagcctgtccttgagatgctacaggttacagtccacttgaacttttatatggatgcactttcttgcttggccccaacctcatcccagacaccagccctctaggagactatcttccagtcctccagcaggctagacaggaaattcaccaggctgctaatcttctcttgcctactccaggttcccagccatatgaagacaccctagctggacgatcagttcctgttaagagtctgacccctcaaactctgcagcctcaatggaccagaccctacctagtcatctgtagcaccccaactgccatccatctgcaggacccccccacccccagttaggttcactgttccagaataaagctgtgcctgtcagagagacagcctgatctctttcttttcctcctggaagtctcaagtactcacccctacttcccttaaactcacctgcattcctaaaggataatagtaacccttataagcctaatacatcttttcatttttattaggtctcttcttccttagcctgctctttacaacagggctttatgcctacctcacttggactgcgccccaaaaagttgtcatccctactatcttctctctagtcatactcctattcaccattctcaactactcataaatgccctgcccctgtttacactgctggtttacactttttctccaaaccatcgtagcaaatatctcctggtactatccccaatctgccactcttgactccctcttggagtggatagatgatctttgctgagagggcacactccaatactttcaccgtgataaagtcctattctttacttttatactcactcttatttttgttcccattcttatgccaccctctacatctccccagttatctccaccacactatcaatctcactcactctctccaagccatttctaatcctgctttaacgaacaattgctggctttgcatttctcttttctccaaagccacggaggcctcaactcactcactgctaaaaaaaaaagactgtatatttttaaatgaagagtgttgtatttacataaatcaatctggcctggtatatgacaacataaaaaaactcaaggataaagcccaaaaactcaccaaccaagcaaataattacactgaacccccttgggcactctctaataggatatcctgggtcctccaaattcttagtcctttaatatctgtttttctccttctcttattcagaccttgtatctttcatttaatttctcaattccctcaaaatcacatccagaccatcaccaatcattctatacgacaaatgctccttctaacaaccccacaatatcacctcttaccccaaaatctttcttcagtttaatctctccctctctaggttcccacaccaccccaatcctgctcaaagcagccctgagaaacatcacccattatctctccataccacccccaaaaatttttgctgccccaacacttcaccactactttgttttgtttttcttattaatataaggagacaggaatgtcaggcctctgagcccaagctaagccatcataacccctgtgacctgcacgtatacattcagatggcctgaagcaacagaagaaccacaaaagatgacattccaccattgtgatttgttcctgccccaccccaactaatcaattgaccttgttacattccccctggacaatgagtcacatgatctccccaccctgcaccttgtgaccctgcccctgcccacaagagataaccacctttaactgtaatttccacttcctacccaaatcctgtaaaactgctccaccgctatctccctttgctgactctcttttcggactcagcccccttgcacccaagtgaaataaatagccttgttgctcacacaaagcctgttgatggactctcttcacacggactcttgtgacaacaagtttatctatgttaacaagcctgaacatctacccctgaacttaaaagttaaagaaaaaaagagtttaatttggaggaaggaaagaacaagtaatgacatcctctggctctgatggcctatgatctcgtactaccacttccaaataagaatcttttttagattattttatattccatcactggcccatactattactactggctcataaaggatcaaataattatacttttgaacattcagtttttgaactgaatcaaataatgtaagatcttaatgtactttatgtatgcatgttttatgaaatagcccagaacaacagatgtaagtgctataaattaggccaggttaagaggagtcaaagctggaaattgacatacctactaggactcatgggaatccagctgcactcccaaactggcttctatgtctcctttgagaaagtaaccacttggtcaaaagcacatgtgtaatgtttcatatacaaactcccatcttggctattcacaatgcacatttgaattttagagactgagtaattccaacaaggaaagtcattcaactttgttaaatgatttaaaaaaaatatgtaatgaacatttttttcttaatattttgcattaaaattagtttagaaagcacagcaatatagagtttaggttccagaacatgctgggaatttcatatactgtattgtcacacaggcctaatacactgaattcaagaaaagtgttgtttctttattagtagataccatattgattttaaaatgtgcatgcaaaaaaactatgatcaacactatttaaacttttaacttatttgggtctaagtacctcaatattttttatcttaagattatatagatgctttgaattgtatttgttgtactaagttgatcatgaattatctaatttaatcttaatgataatcttataaggtagatagtggcattctcattttattgatattaaagtcaagatttagataaattatgacttttgaaaaaaatggcagatagaaggcaggactaaattccagctcccacttgggaggacagagcagtgtttggatacctgcaatgtgagcttttgttccaggaactactgaaagaagatatcagaaaagctgagagaatccacagaccctttgaaggaagtggatttctcctgcaagacccagtagatagcctaaatactgtcagtgcccatactaaaagttggaaagggggattgtctgcccccaaacacacaccctcactggagaacctgaaggtccagataacaggggaaggatttgaccttacctggagctgagacaatttaaagagccgagagaaatacaggagtagaggaagcaatgggaaaagccctgtggactctctagtttcacagggaagccatttctgacttgtctcacaggggcccttgggaagggctaccagagtaactgggaaaagaccacagggagaaggaaacctccagctgaacttgtaacaatcccaactgaatgcaaagtttcctggccagaactcaggggaggacatgaatccagtgtgcaggcaccacaggcagggaggtacaaaagccctgcttgctttctcagccaggaggctggtagcctggggcaagttctcagccccactggcccactgcctggaaacaaacctggtgctgttagggcaggggggcacagtgggagtgagactggccttttaagttgcatgggagctggatgaagcctgtaactgctggctttcctcccactttcctgacaacctgcatggcacagcagaggaagccataatcctcctggcaacataactccattgacctgggaaccacacctcatgccccacagcagccacaggaagacctgcccaaggacagtctgagctcagacatgcctagccccaccctcacctaatggtccttccctacctaccttggtagctgaagacaaagggcatattcttttgggagttctagggccccactcaccacctgatcctccctatactaccatagctgatattcttttgaaagcaccaccaactggcagaaggccaaccaggacaaaactagtgcattaaacaactacaactaaggactctcacagagtccatttcactatcctgccatctccaatagaccaggtgctgatatctacagcttagagacctgaagacggttcacatcacaggactctgtacagacaccccccagtaccaacccagagcctggtagacctgttgggtgactagatccagaatataaataacaaatactacaattcagctctcagaaggccacatccctaggaaaagagggagagtactatatcaacgagcaccccatgggacaaaagaatctgaacagcagcctcgtgcacccaatctttcctctgacatagcctacctaaatgagaaggaaccagaaaaacaattctagtaatgtaaaaaaaacaaggttctttaatatcacccaaaaatcacactagctcatcagcaatgaatccaaacccagaagaaatccctgaattgccagaaaaagtattgagaaggttgattattaagctaatcaaggaggcactagagaaaggtgaagtccaatttaaggaaatttttttaaaaaatgatacaagataggaagggagaaatcttcaatagatagagtaaataaaaaataatcacaacttcaggaaacaaaggacatacttagagaaatgcaaaatgtgctggaaagtcagcaatagaattgaacaagcagaagaaagaacttcagagttcaaagacaaggtttccaaataacccaatccaacaaagacaaagaaaaaagaataaaaagtaaataaacaaagcctccaaaaagtttgggattatgttaaatgaccaaacataagaataatcagtgttcctgagaaagaagagaaatctaaaagtttgaataacatatttgggaaaataattgaggaaaaattacccagccttgctagagacctagacatccacatacaagaagcttaaagaacagctgggaagttcattgcaaaaagataatcacctagacatatagtcatcaggttatctaaagtcaagatgaaggaaagaatcttaagaggtgtgagacaaaagcaccaggtaacctataaaggaaaacctatcaggttaacagcagatttctcagcagaaaccctacaagctagaagagattggggccctatcttcagcctccttaaacaaaacaattaccagccaagaattttatatccagctaagcttcataaatgaaggaaagatacagtctttttcagacaaataaatgctgatagaattcaccactaccaatgcagcactacaagaactgctaaaaggagccctaaatcttgaaacaaattatggaaatacatcaaaacagaacctctttcaagcatgaatctcacaggacctataaaacaaaaatacaattaaaaaaaaaaaaacaaggtattcctgcaacaaatatcaaattaatggaatagtacctcacatctcaatactaatgttgaaagtaaatggcctagatgctccacttaaaagatacagaattgcaaaatagataagaattcaccaaccaagcatctgctgccttcaagagactcacctaacacataaggactcacataaacttaaggttaaggggtggaaaaagattttccatgcaaatggaaaccaaaagcaagcaggagtagctgttcttatatcagacatagaaaactttaaagcaacagcagtttaaaaagacaaagatgaacgttatataatgatgaaaggccttgtccaacaggaaaatatcacagtcctaaatatatatgcacctaacattggagctccccaatttacaaaacaattactactagacctatgaaatgagatagatagcaacacagtaatagtgggggacttcaatactccactgacagcactagacaggtcatcaagacagaaagtcaacaaagaaacaatgaacttaaactataccctagaacaaatggacttaacagatatttacagaacattctgcccaacaaccacagaatatacatttattcaacagtgcatggaactttctccaagataggccatatgaatggccacaaaacaagtctcaaaaaatttaataaaattgaaactatatcaagtgctctctcagaccacagtagaataaaattggaaatcaacctcaaaaggaacattaaaaccatgcaaatacatggaaattgaatgacatgctcctgaatgatcattgggtccacagtaaaatcaagatggaaattaaaaaattctttgaactaaatgataatagcgacagaacctatcaaaacgtctgggatacagcaaaggtagtgctaagaggaaagttcgtagccttaaatgtttacatcaaaaagtctgaaagagcacaggtagacaatctaaggtcacacctcaaggaagtagagaaacaagaacaaaccaaaccaaaattaagcagaaaaaaagaaataacaaagatcagagcataactaaatgaaattgaaacaaaaacttacaaaagataaatgaagcaaaaagctggttctttgaaaagataaataaaattgatacaccattacaagattaaccaagaagagagaagactcaaataagctcaattagaaacaaaataggagatactacaactgacaccacagaaataaaaaagatcattcaaggctactatgaaaacctttacatgcataaactagaaaacctagaggagatggataaattcctggaaagatataaccctcctagcttaaatcaggaagaattagaaaccctgaacagaccaacaacaagcagtaagattgaaatggtaattaaaaaattaccaagaacaaaaaaagttcaggaacagatggattcacagctgaattctatcagacattcaaagaattggtaccaatcctattgacactatttcactagatagaggaagagggaatcctctttaagtcattctatgaagccagtatcatcctaataccaaaaccagtaaaggacattacaaaaaaagaaaaccacagaccaatatccctgatgaacatagatgcaaaaattcttaacaaaatagtagctaactgaatccaacagcatatcaaaaagataatccaccatgatcaagtgggtttcataccagggaaacaggatggtttaacatacacaagtcaataaatgtgatacatcgcataaacagaattaaaaacaaaaatcacacgattatctcaatagctgcagaagaagcatttgacaaattccagcatccctttaatgactaaaaccctcagcaaaagtgatatacaagggatacacttcaatgtaataaaagccatctatgacaaacccatagccaatataataccgaatggggaaaagttgaaagcattccctctgagaactggaacaagacaaggatgcccactctcatcacttctattccacatagtactgaaaggcctagccagagcaatcaggcaagagtaaaaaatcaagggcatccagatcagtaaagaggaagtcaaactgtcactttttgctgatgatatgatcatatacctagaaaaccctaaagactccttcaaaaagctattagaattgataaatgaattctgcaaggtttcagaatacaaaattaatgtatacaaatcagtagctctgctataccagcaagctctgctatatacagcaagcaagctgagaatcaaatcaagaactcaaccccttttacaataactgcaaaaaaaaaatacttaggaatatacctaaccaaggaggtaaaagacctctacaaggaaaactacaaaacactgctgaaagaaataatagatgatacaaagaaatggaaacacatcccatgctcatggatgggtagaatcaatattgtgaaaatgaccatactgctaaaagcaatctaaaaattcaatgtaactcccatcaaaataccaccatcattcatcacagaaatagaaaaaaaatcctaaaattcatatggaactaaaaagagcccacatagtgaaagaagactaaccaaaatgaacaaatctggaggcatcacattacctgacttcaaactatgctataaggccatagtcactaaaacagcatggtactggcatagaaataggcatctagaccaattgaatggagtagagaatccagaaataaacccaaatacttacagccaactgatcttcagcaaagcaaacaaaaacatgaagtggggaaaggacaccctactcaacgaatggtgctgggataattggcaagccatatgtagaatgatactggatcctcatctctcaccttataccgaaatcaactcaagatggatcaaaggcttaaatttaagacatgaaactataaaaattatagaagataacatggtaaaaacctttctagacattggcttaggcaaagacttcatgacccaaaagcaaatgcaacaaaaataaataggtgggacttaattaaactaaagagcttctgcacagcaaaaggaacagacagcaaagtaaacagacaacccacagagtgagataaaatcttcacaatctatacatttgactaaagactaatatctggaatctacaaggaactcaaacaaatgaataagaaaaaaaacaaacaatcccatcaaaaagtaggctaaggacatgaatagaaaattctcaaaagaagatacacaaatggccgataaacatatgaaaaaaggtccaacatcactaatgatcagggaaatgcaaatcaaaaccacaatgtgataccaccttactactgcaagaatgatcataaccaaaaaatcaaaaaataatagatgttggggtgaatgtggtgaaaagagaagacttctacactgctgataggaatgtaaactagtacaaccactatggaaaacagtgtggagatttcttaaagaactaaaatccagcaatcccactactgggtatctacccagaggaagaaaagtcactatacaaaaaaagatattgcacatgcatatttatagcagcacaattagcaattgcaaaaacatggaaccagcccaaatgcccatcaatcaatgagtggataaagaaattgtgatacatgtatatatatatatatatatatatatatatgtatatatgtatatatatatatatatatatgatggaatgctactcagccataaaaaaagaacagattaatggcattcgcagcaatctggatggaactgaagactattattctaagtgaagtaactcaggaatggaaaaccaaacatcatatgtcctcactcataagggggagccaagccatgagcatgtaaagtcataagaatgatacaatggactttggggactccagggaaagggagggagggggttgagggataaaagattacaaattgggttcagtgtataatgcttggctgaagggtgcaccaaaatctcacaaatcaccactaaataacttactcatgtaaccaaacactatctgttcaccaataacctacaggaataaaaaattaaaaattagaaaaatttcaaatttattaaaaaaaatttatataaattaaatataatgcccaagattccagagctagcctcactggggtcagaggttttaatccagagagtccaactatagagttttaaccactggaaatactgtcttgctaggcattaggcttcagcaacttattttaacaattgtttagtaagtagcagtggctacagttgtcattggcattagagtgcttcaacaacaagaaaaactatttgtgaataaataagcatgtagaacacagtggttgagaatctaaaaacttgccatattcagcaagtaggttggtatgaaagtcgggattgtgtgccagaaagaaaaataagataacataatttcaaaatgaatgtctgtccttttaatagaattcaccttagcaaagtttatctaatcactattcttaacttcatctttttttaatttcaagaaccaggtcattatgaaaaggtctggatggttcaaaaaagcaaatttggcacaaaaggacaggtcaggtacaaagtggctagaaccaggacagtcgtggcacttgatcacaagaatgaagacaaaacccctcactgaaagtagagccagagatcacagactggctcagtggcaaagttggagactggttgacaattacacacattctctccttaagattcaccccatccccatgataataagagcaacaatagcatgacatgcacatgcacacacacacacacacacacacacacatacacagaactcctatgcagggatgcatcccagtgtagagataaatttaaatgacatcaattgaaaaatacaatgaaatgtctctatttcttttcttcaactaccctatgcctctttattcacctgaaccccctttcagaaagtctccaagaccctgggaaatttcccatgccttcccgacttccaacacagatctcatttgaccatgctccttttctgggtaatgagtgtctgactcagtggtaacttggtcagctttgggtcagagaatccaagcttttttttttttttttttcccaaaaggttacaattccatgttgaactggcagatgatgcttgtcatctcattctggctccaacgcttgacagctctatggctttgggcatgttatttatcttctctgtggctcatttttttatttataaagtgggcagatatgaggacctccccttagggttcttattaggattacgtgaaacaagccatgtaaagcatttagcacagtgctggcatgcagtaagtactcagtaaaagtcattattattatgttcactcttgctatttttgttacatgtagttgcaatgttggcaaaaatgagttcttaaacctggaatttcagtctagtttgtgaattgagttacacagagaggccttaattttgctcatcgggttggtgattgatgcttgtttgctaacacagaaaatgttggcaaaggcaggaaggagggctggcagaatagctgtactaattaccgaaggtgcaaattcaacatgcagcagtcttgcacgacataatgagcctgtgctgaggtgaaacaggaggtttgttacatacattagaattagatgctctaattgcttagcatcccaaatgtgaatgatttcttgagaaatagaagaaagtgatccacccacttctacatgacaacaaaagagttctcttcagttggctgataagcaggaaaccaggacgtaagggtaatttcatccaggcaacaattgactagatatgctgctacctcttctcaaacaccacagggagaaacagaagaatgtgatgaaggaacaatgtcctttattaaggggaacctggtagcatttcttcactggctaatgaggggactggcagtgggtcatttgtgctttgatggatgtttaaaattcaggagttgaaccagccaatcaagcagcagctatgataggaataagaacaacttttggttattgcgtttaaggaatattatacattatcctgagcagattctaagaatctaagactatgatttcaagagaatatacatatttatggaatttagcaatgaagtcattcaacagattgttcaacagtgccacctgtaggcaagtgtatgcccctttaatggtgtgatgtcaagaaagaatcagcacctctcaaaagtttggcaagagcttttagatcagactgaagttttaatcctaattctgattttcatgagctatgtgagctttggcaagtttctccacctttctgaattattcaataactgtttttgcaactccagtgacaaataacactcatttttaacagaaacagtctattccatcttttgagacatgagttctggaagttctttgcagggctatctcaatataattttactaattagctcaatttcccctcttgggaatattcaaatctttcatcaatcaatatagttctaaaaatattagagaacagatattgccttccttcttaatctttctttctctgggctagtactagttgcccttatgaccatctttttttttttttttttttgagacagggtcttgctctgtcatccaggctagagtgcagtggcacaatcacatctcactgtagcttcaaattcctacgctcaagcagtcctcctacctcagcctcccaagtagctgggaccacaggcatgtgctaccatgcctggctaattttttgattttttaaataaagatgggggtctcgctttgttgcctaggctaatctcaaactcctggcctcaagcaatcctcctaccttggcctcccaaagctctgggattccaggtgtgagccaccatatccagcctccttatgaccatcttatacaaaacaaaaataaatgctaatcactaacatcagtagtagttacaagaatttttttcagaactttatgaggtagttctattatttattttatttcattatttctattttattttataattccttttttgttttatgacctcttactatccctatgaaatctgatgaaatcaaagtattcattcagtttacctaagcttataaccctgcatatggtttaaacaccccttaagacctatccttggtctcaggtcctcagtaaagctacctggacctcaggttttaaaactcctattttaaaagaaggaattgaagagatggagccaatattctatttttgctccctcaatcttacttctcactcttcttctgcagatatccttactccacaaactccgataaaagaaacaaatcccttggttttgttgacctagtaaacattgctactgttgtgttttcacaccagcaaatagaatttattgctaaaaagtcagaaagttactttttaattttcagtttgcacagttcttcagtctgggagactgtagagatttcaaatctagccacaggtgttcagtgagtagctacactctgggcctagcttccaggaagagtcagcaccttctacaaaagaaagaagaaaacattcttgtctggtaagaagatagaaggctcaaggtcaagaaggcagcagatgtgtgaatctaaagttttcagaagagagaaagaaagattgccttttgagctataattttcagctttgtgaaggcaccagaaccacagatcatcactatgcagctattatatttcaggcattgatttttgcaacaaggtacagggaataggcaaacactgaattttcattagctccttgaggaaagtgagcatccttcccaaaccaaaatgtccagaacatattaagggataatttataaaagctggctcagtggattttaaacaaacagcagcaattgcaatgaagcattactgggtgagtcgctaatttgaagtaggtcatgcccatgttaaagagctacttattcaaagcacttgccttttctttactcaaaactttaataggaaagctgtctgttgtttccttttttgtttcttttgtatatgttttttccacagaagggtgttatgaaaaacctgaagagttaagagataattccaggttaaaaatacctataagatttatattatatcagaaatcaaagtcctcaacactagtaccatattatgtactcagacaccaaagtaaacactgggaagtatattgagtaatgtagaaccatctctgtggcatttatcaaaacctacttggcactatgatcacttgagtcttacttttactcttcttacaaagctataagcttcttgaggtcagagaagcctttttactcactgcaaagtctgatacaggagctcacacatactgagtaatgggaaaaaaaagggacttacttccacatctaagaatgtatcctacatgaataattgtgttgaaatgtccatataaagacatttcctgcagtcattcattatttcagttaagaaatatttatgtgaggcagtggctcacaactataatcccaggactttgggaggccgaggcaggtggatcacctgaggtcaggagttcgagaccagcctggccaacatggtgaaaccccatctctactaaaaatacaaaaattagccaggcatggtggtgggtgcctgtaatcccagctacttgggaggctgaggcagaagaattgcttgaacctgggaggcagagattgcagtgagccgagatcatgccattgcactccagcctggatgacaaaagcaaaactccatcaaaaaaagaaagaaagagaggaaggaaggaaggaaggaaggaaggaaggaaggaaggaaggaaggaaggaaggaaggagggaaggaaggaaggaaagaaggaaggaaggaaggaaggaaggaaggaaggaaggaaggaaggaaggagggaaaaagaaaagaaaagaaaaaaaaagattgatttgagtggtttgacttctaggtattgtactcagtgataggtttattgaggggagcataggtggacatagtccctgtctgccctttgagagctcacaggataatgggaaaatggacattaactaaatgattacaaaacatgtatttagctacagagtgtgataaggactttgaaggatacatatttgattctgtgggactatgtacccaaagatctgatctactcagggggactataaaggcttttctaaggaagtgatgattgtaccaagaccataaggtaagtgatacatgtatattgagaaggcagaaggcagatggcagagggcaggagggaaccaggagagtggaggagaatgtagaactgcagtgcattctaggagtgagatgtgtcaagacagatggacatgtaatgtcatggaggccatactaaggagatttatctttaccagaagagtaatggtagccaggtgcagtggcatatgcctgtaatcccagcaactcaggagtgtgaggtggcaggatcgctcgagccaaggtggtcgaggctgcagttagccacaattacaccatcgcactccagcctgggtgacagagtgagattctatctcaaaaaaaaaaaaaagtaatgggatgtcactgaagggtcttaaggtaggggtgatagaagaaatggatgtttttgtatagtgtaattttacatcataggaaaaatggaaaatctagtctctacatattttttaaaagccctgagcttatttatctatctatttattaatttttaataaaaggaaagtgtagttagggaaagttttctaagaaagcataaaagcaatctgttttctcagatattatataaggtacactgaacaacaaaataggcaatgccttcaacaattgttctgcaacaattgttggagctttccaaatatagtcatttcttttagcaatattaaagaacaaaaactaagggaatagcattgaaacaaaatatgggacaaggttttgtttgtgtgtggacagcaaagctaatgtgttccagataaacacttttctgtgggtctcattagattttaagctaaaactgacagctgaactactactgtagatacaaagatgaaaaaggcatggtccctgttctcagagacaccacaactaatttatgaagatctattattatttcctaagcttttatttgtttgttttttgtcttgagacagagtctcactgtatcgcccaggctggtctcaaactcctgagattgagcctgatcttccctcagcctcccaaagtgctaggattacaggtatgagccaccatgcctgccaatattttcttatacttaattaaaatgtatgaattatttatatcacaggcatacctgtatttagttaaaatatccaatagcttattagacaatgtccatgaaataagattatttctatttattttttattaactgcaatgtttgtctagatgtttagactgatactaacttttctcaaacttctgaacattgctaagttatttcttccacaaaattataatcacacatttccaagctatgtaattatagggttaaacccattaatagaaatcgtaatttgtcattacatatttaaaatgaccctaacaaaagtacaaaagggtaagcaatagccaataatatatgctcacagagattagattcaaaatgttattcatactccttagaatattaattttgcaagatactgaaacactacaacatttgcaaatattatcctaggcatttggcacagaaatttcatatccttggtaagattttagcacagaaattgggttttaaagtcttgtacttaagactgcacgatttcaggaaggtttcattaatacaaatgataaacaaatttatatggttgaaaagcaataacaaaaaatttttctaaatttctgaacaaattgatataaaccaaatcagaaaatgtgctactctaccaaacttgggttccccgaaactgtttctgcatgcatacggacttttcatttgacttgatgatactctaagtgtattagccaatatggctaatcagtatattttcttattctactttgaatgtcccttaagaaggcaagagcatagtttgactattagaatacttgatatgtagctgcagtttaggaggatactttcccaaaccctactttcattttttaaaagtcaatattattgagctataacatataaaaataatgcacccattgtaagtacatgattcattgaatctagacaacacatgcaattgcataaacatcactacaatcaagacataaaatatgtccagcacttcagaaaggctgctcatgtttttttgaggttatcctcacccttggccccagacaataacttatctgctgtcatcacagattggtttcatttctttttgaatttcacatataaaatcatacagcatgtactcttttgtgtcttttttgtgttttcagatgttttattataattatgctgtattagtctgttctcatgctgctatgaagaaatacccgagactgggtaatttataaagaaaagaggtttaattgcctcacagttccacatggctggggaaacctcaggaaacttacaataatggcagaaggcacctcttcacagggtggcaggagagcaaatgagtgccaaacaaagggggaacccctttataaaaccatcagatttcatgagaactcagtgtcatggaaacaccatggggaaactgcctccatcatccaatcacttcccactgggtccctcccacaacatgtgggtattatgggaactacaattcgaaatgagatttgggtgggaaaacagccaaaccatatcatgtgcctaggaatatttttgtttgtatttatcctgctcagagctttctagctttttgaatctataaatttgtgtctttgcaaaatttgggaatttgagggacattatttcttcacatttttctgtcttgttttttttctatcttcctccttggactcaaatttcacatatgatacaacaaatgttatgcctttgaggctctgttcacttttttcagtattttttctttgtcttcagattgaatattttctcctgttcattgatcaaacttattggactttttctttgtcatttccattttgctgttaagcttattcactgagtttttttttttaatttcaaatattgtattttccagttctaaaaattctatttttaatatttccattcctgaattttgtatttctatctttttattcattctaagtatattttcccttatattattgagcataattataacatcttctctaaaattttgtctagtagtttcaacatcttggccatttcaagatcattatttttcttactggtcttttcccctaagagaatggttcccatttttgatttcttcttttgttaagtaagttttgtatggtatcctggacatatgcatttaatattatagagactctggattctcttatattgccgcatatagtgtagatgtatttgttctagcaaattgcttcgataaatttaaactgcacactctttctcctgggcagtagtcctgatctcaattctgtcctttttgccttgctatgttactgaaagtctaccacacacagatgtgattcagaggtcatcgatatctgggaagagtttatacactaattattggactttccctctgtgggtctccccaggattcctaacctgtttttctacaactgtggttgccctgaactttctcctctgtttctttgagccaacatgacaccagactttcttgtagttttatcaccccatgtgcacacactgtcatttctcaggatggaagcaaagaaaatgggaaactcccccagtgccattcccttcccagtatcgattcctgtgcccatctccaccccatagtctgtctgctttttgtcactctccggtgcctttgggaaggttttgttatttattttttatttttggaacagatttcatatttgttatttgagagagtggagctttctgagctatccactggaagtggaacccacatttattttaaatgatcaaattatggcagcttgagcccccactgatatatctgatgaatattcgttcacctcaatatctcttttggctataacaaaaagtcctaaaagtggtgccctaatcatgcttacgaaccactgttgaaaccactgccatgtggttttcactctactcccccttttatatactcagtggctgtaaagtcccttggtcaagctttgccactgtcactacctgccatgttgtccctaaaagagttccgaacagaaagagacagatggcttttattgcctttttacttggaatccaaagtagctccatttgtgcctagagtcacacaaagaatctcattaaatctgtttgccagatgagatcagatacgtgcagagtgacacagccataggggttctagcatcacctctctgtccatatctcccgtttatttctaaattatggtaataaatattaataaagctcagtaaccgaacaatgtgaagacatgtcttcactctaatgaaagtaatattagctataatttattgagttctttaccatgtgctaggacctacttgatatggttagagagtaatacttaagaatgtgatctttgaagctggattttttgggttaatagtattacttttaataagttgccaactctctgtgcttcagtttcccaacttggaaaagaaaaaaaaaactgaccaactttagagtgtgttataatgattaaatgaacaatacaggccatccatttagaattgtgccaagtacatagtgagcactcaataaatattagctattactgtaattatgactgtcacaacaatcctatggaatctattctcttaatttttaaatattttataaatgagaaaactgagacaataaaagcttccaccacttgcccaggttcacttagttttgaagaaacataacttgaattttgagtcagatgttctggctccagggtccaggtatttaaccagtctcctgttttaaacgcagtccaagtagctggttgcaggatgaatgccacactgttctcccagttctccccactgcaccaaggttcacatgttattaactgatacgaacaaacactgggaaaagtgggaagagattttatcaggctcttgctcagccaacgaaaattctcttgtaactcctatgattaattgtactaaaaaatccactataacttttaaagatttaaggtttgttctaaatcttcaactttttagtgttttttttcatttgtttttaatctcagaaaatacatcagtgctgaatcacacaaataggtagataaatactgtcttggtaagtttgatcttatgataatatgttgtttttgtagtagcattgctcaggtactgcactattaatatttgattagcatattttagaaatatatctctctgtggttatatgtcacacataaaaacaagtaaatattaaatttacatacaactttagttagtagtaaaaatagaaatagattttattcattttgccctcagcagatttatcacttttattaaagaattcaagctttcatgttatgaattattagaataataataatctatgatagaaaaggacacagaaggtttgtaattcttccttacatcaaattttgcatagaaatcctttctgttatatcataggtatatcatcattcatccgctattttagatttatccattgttagaaagtgttgatttttaaaacattctttccatattgagctaaaagctcagtttttataaatgtcactcattagctttagatgcagccataagaaaacatgaaaatgaactctctcttttatgttacagctatttaaatacttaaaaataattatcctttttatccaaatatccttggattaaatagtctatatattatttccagaacttccttaacatataataattgtcttacatatgaacacatgctcatctatttctgttttaaaaagtggtgagtagaacttaacacagtacaatgtatatgatcagatgagtgcagaattcactaggtctatcacctctcttgacccagaaactctacttggattaatgcagtttctgaatgctttttttctcttctactgctgaccttgccactaacaaaatatcattaaagttttcttactgctttaaatattatttaaatattacatcaatctataaaaacatacttctttctaatgtaggagaggctggcaagatggccaaataggaacagctccggtctgcagctcccagtgagatcaacgcagaaggtgggtgatttctgcatttccaactgaggtacgtggttcatctcactgggaatggttggacagtgggtggagcccacaaagggcaagctgaagcagggtggggcaccacctcacctgggaagtgcaaggggttgagagatttccctctcctagccaagggaagccatgagagactgtaccaggaggaacggtgcactctggctcagataacacacttttcccatgttcttcacaactggcaggccaggagaattcctccagtgcctatgccaccagggccctggattttaagcacaaaactaggcagctgttagggcagacactgggctagctgcaggagtttttttttcgtaccctagtggtacctggaatgccagcgagacagaaccgttcacttccctggaaagggggctgaagtcaggaagccaagtggtctggctcagcaggtcccacccccacgcagcccagcaagctaagatccactggcttgaaattctcgctgccagcacatcagtctgaggtcaacccgggatgctcgagcttggtggggggaggggcatctgccatcgctgaggtttgagtaggcggttttaccctcacagtgtaaacaatgctgcctggaagttcgaacttgatggagcccactgcagctcagcgaggccactgtggccagactgcctctctagattcctcctctctgggcaggacatatctgaaaaaatggcagcagccccagtcagggacttatagatgaaacccccatcttcctgggacagagcacctgggggaatgggtgggtgtggttacagcttcagcagacttaaacatccctgcctgacagctctgaagagagcagtggttctcccagcacacagcatttgtgctctgataagggacagactgcctcctcaagcgggcccctgacccccgtgtctcctgactgggagaaacctcccagtaagggctgacagatacctcatacagaagaactctggctagcatttggtaggtgcccctcagggacgaagcttccagaggaaggaacaggcagcaatctttgctgttctgtaccctccgctggtgatacccaggcaaacagggtctgaagtggacctccagcaaactccagcagacctgcagcagaggggcctattggaaggaaaattaacagacagaaaggaatagtatcaacatcaacaaaaaggatgtccagcttccccatccgaaggtcaccaacatcaaagaccaaaggtagataaatccatgaacatggggagaaactggagcaaaaaggctgaaaattccaaataccagaatacctcttctcctccaaaggatcacaactctgtgccagcaaggaaacaaaactggacggagaaagagtttgacaaattgacagaagtaggcttcagaacgtgggtaataacaaactcttctgagctaaaggagcatgttttaacctaatgcaaggaagctaagaaccttgaaagaaggttagatgaattgctaactagaataaccagtataggaagaacataaatgacctaatggagctgaaaaacacagcacaataacttcatgaagcatacacaagtatcaatagacaaatcaatcaagtggaagaaaggatattagagactgaagatcaactcaataaaataaagtgagaagacaagattagagaaaaaagagtgaaaagaaactaataaagtctccaagaaatatgggactatgtgaaaagaccaaatctacgtttgattggtgtacctgaaagtgacagggagaatggaaccaagttgaaaaacactctttaggatatgatccaggagaacttccccaacctggcaagccaggccaacattcaaattcaggaaatacagagaacaccacaaagatattccttgagaagagcaaccccaagactcataattgtcagattcaccaaggttgaaatgaaggaaaaaatgtttaagggcagccagagagaaagatcgggttactcacaaagggaagcccatcagactaatagcggatctttcagcagaaaccttgcaagccagaagagagtgggagccaatatttaacattcttaaagaaaagaattttcaacccagaatttcatatccagccaaactaagcttcataagcaataaaaaagaaataaaatcctttaaagataagcaaatgctaagagatttttgtcaccaccaggcctgccttacaagagctcctgaaggaagcactaaacatggaaaggaacaactggtaccagccactgcaaaaacacggtaaattgtaaagaccaacaatgctatgaagaaactgcatcaactaacgagcaaaataaccagctagcatcataatgacaggatcaaattcacacataacaatattatcatgaaatataaattggctaaatgccccaattaaaagatgcagactggcaaattggataaagaattaagacccatcagtgtgctgtattcaggagacccctctcatgtgcaaagacacacataggctcaaaataaagggaaggaggaatatttaccaagcaaaaggaaagcagtaaaaagcaggggttgacaacctagtctctgataaaacagactttaaaccaacaaagatcaaaagagacaaagaaggacattacataatggtaagggatcaatgcaacaaaaagagctaactatgataaatatatatgcacccaatacaggagcacccagattcataaagcaagttcttagagacctaaaaagagacttggactctcacacaataatagtgggagactttaacaccccactgtcaatattaaacagatcgatgagacagaaaattaacaaggatatccaggacttgaactcagctctggaccaagtggacctaataaaaatctacagaactctccaccccaaatcaacagaatatatagtcttctcagcaccacatcacacttattctaaaattgaccacataattagaagtaaaacactcctgagtaaatgcaaaagaatggaaatcataacagtctctcagaccacagtgcaatcaaattagaactcaggattaagaaactcactaaaaactgcacaactacatgggaactgaacaacctgctcttgaatgactatgggtaaataatgaaatgaaggcagaaataaagatgttctttgaaaccaatgagaacaaagacataatatatcagattctctgggacacatttaaatcagtgtgtagagggaaatttatagcactaaatacccacaagagaaagcaggaaagatctaaaattacaccctaacatcacaattaaaagaactaaagaagcaagagcaaacaaattcaaaagctagcagaagacaagaaataactaacatcagagcagaactgaaggagatagagacatgaaaaaccctccaaaaaatcaatgaatccaggagctggttttttgaaaagatcaacaagatagatagaccactagccagactaataaagagaaaaagaaagaagaatcaaatagacacaataaaaaatgataaaggggatatcaccactgattctacagaaatacaaactaccattgagaggtgaggccagctggacttcccggctggagtggggacttggagaactttcctgccttacaaggggattgtaaaatgcaccaatcaacgctctgtagctagtaagaggtttgtaaaatggaccaattagcgttctgtaaaatggaccaatcagcactctgtaaaatggaccaatcagcaggattctaaaagttaccaatcacggggaggattgagaaaagggctttctgataggacagaaacaggacatgggagaggacaaataagggaaaaaagctgtccaccccagccagcaacagcaacccactcaggtccccttccacgctgtggaagctttgttcttttgctcttcacagtaaatcttgctgctgctcactctttgggtccatgccacttttaagagctgtaacactcaccgtgaaaacccgcagcttcattcttgaagtcagcaagaccatgaaccaccagaaggaaccaactccggacatatcttgggggctcatctgggatttcgccatgtggtgagtaccatcggaccccttttgctgctgttctgtcctatttttccttagaattcaggggctaaacactgggcacctgttggccagtaaaaagtgactagcactgccgtcatactaaagacacgggtgtcagactttctgggaaagggctctttaacaacccccccgactcttgggagccgggagcattggtttgcttggaatcaactccttcttttcctgtacttctgggctgagctgagggttgacagagaggatagccatttagctctgaggtcccgacaaaaagttggttggccttgcagccgtgagcagaactctgaaagttacatttcccaaacaagactcgcccatctatcctatctatcctgacccttgcctcctgggtcctaatgcctgtcagacaaacttcctcctacctgtcttctttgaggctagtcctgcttctaaaaaccactccctgtccctggtacccttctagtttctcctataaaaatgatttctagtataaatttcagaactctgttcccttctttaggcacctgggctcaccaattagaaagacataatttttgcccaaagcccattctgggggtgggggaactatctgggaactatctgcctcctcagactagaagacctaacaaaacctattcccaaagctaggatatggagagcctcagaaattatatccttcctattcatatgatgagaagtgaggacaaaaggcatcactcttccaaccctgcagatcccttacctccttcagggtatggccctccactcaatttttgtggtatatcatctttataagataagggtaaggtcccaatactaacataagaaaatgcttaggactctgacaggtttttgagaatgcgtcggtaagggccactaaatccaatttttctcagtcctctttgtggtctaagaggaaaggcaagggtgcaggtttttgataatgcatcagtaggggccactaaatctgaccttcctcagtcctctttgtggtctagggggaaaaatagtttttctgctgctgtttcagtgagtgcaactctaacattcaggacataggcaataccattcaggacacaggcatgggcaaagaattcatgactaaaacaccaaagcaatggcaacaaaagccaaaattgacaaatggaatctaattaaactaaagagattctgcacagcaaatatatatatatattcagagtgatcaggcaacctacggaaggggagaaaatttttgaaatctatccatctgacaaagggctgatattcaaaatctacaaagaacttcaacaaatttacaagaaaaatacaaacaaccccatcaaaaagtgggcagaggatatgaacagacacttctcaaaagaagacatttatgcagccaacaaacatgaaaaaaagctcatcatcacttgtcattagaaaaatgcagatcaaaaccacaacaagataccatgtcacaccagttagaatgttgatcattaaaaagtcaggaaacaacagatgctagagaggatgtggagaaacaggaacacttttacactgttggtgggactgtaaattaggtcaaccattgtggaagacagtatggcaattcctcaaggatgtagatagaaataccatttgactcagcaatcccattactgggtatatacccaaaggattataaatcattctaatataaagacacatgcacatgtatgtttattgcagcactgttcacaatagcaaagacttggaaccaatccaaatgcccatcaatgatagactggataaagaaaatatggcacatacacactggaatactatgcagccataaaaaaggatgagttcgcgtcctttgtggggacatggatgaagctggaaaccatcattctcagcaaactaacacaggagcaaaaaaccaaacactgcatgctgtcactaataagtgggagttgaacaatgagaacacatggacatggtggcaggtggtacatcacacaccagggcctgtcagggggtaggggcagggggaggatagcattaggagaaatacctagtgtatatgacaggttgatgggtgtagcaaaccaccatgtcacgtgtatacctatgtaacaaacctgcacattctgcacatgtaccccagaacttaaagtataattttaaaaaaaagcaagatacacatgtattacagctttttacacataaactcactatgcaaaagttataggaacttatgttactggtaaatactgagtcacagatatctagtctgagtttagatttaccataattgttgaccatacaatgtttgtaatactttatatatggctctactaatataaacgtcattgtctcacatcctatttctccttgtgcctaccttccaaataccaaatagaatgctgtaatttaggtgagaaatcaatcacatttgtcttgtcaatgttctgcaacaggaactctattaaagaagctaacccttaaccttcctttgacagaggataataccaggctaattaactgaatcataacaaatcaacttctagttggattgttttcctaaactgtttgcagtaatagaatgagctccttcttaggacatttgataaggtggggtaggaaaattgaggcatcagcttattgagtccgtaattatctccacataattgtattttttgccagccgcagttgcctaccttcactatgcctggttaattttaccttctgtagtcttctaaagtgaactatgtgttctaacttaagatccttgaattgtgactacacacacacacacacacacacacacgtactttccattacataattacatgggcagtccctattcatttttctcctgttacatcctttatttgaaacgacttcccatcttctctccctaactgtattctaccctgcttttcatgtcccactcctttggggaaaaatctcatgacaaccccagagtttcttaaaatctgggaagctagttctctggaataaaggcagataacagaagtagtacatcttagaagtagtgcaaataaagatgctccatgtccttgctacccctcctttcaatttaaagagaaagagaaaggaaagcagttaaaaagactactccacagtgaaatgagcaagtgagccatcttacttgctctatcattgtacttgacaccatatcagcaacaccaaatacagtgcctgacacctcatagccagataggtcaggggtatctgacgaacacctggagaatagatctttagtaaaatgggtgaaatgcaagttggtaaaaaaaaaaaaaaaagcacctaattatcacatttcccagtgtggacagtggtagttcagtggcaattaaattaatatgggcacaacaattgaataactagtgtatttaaaaaattatcttgcatcccaaagggacttgcaggcctagagtggctcagggaaagacctgctaaactatttctcatgccatgaaagttggtaccatggggaaaactcagaattctttgcaactaaggatattttttttccagagaatgaaagtatcgagggggtctggaaaattatcctctaatatatgaaacaggaactgaatttaaacacagtactgaaagtagacagacagtgactggaagacacagggagaaagattttgtttcagtataaaggggcattgtgtaaaatgttaggtgttttccaatggggatgtgctggaaggaccttaaaaagagacaactgctggactagtgatatgactcacgagatatggtccgtttttgagatcctgtgatgtgtgattcagtaaaatttctttctagagagaaataattagaggcactctactgttacatagagtgaaatcctggccactaatatcagagtatccttaagcaattatttaaaatggagatgttttgcttaattcaagggatgctacttaggctctcttgggggaagagccttgcaatctgcatttaagcaagatccagacaatcaaatgctcattaaagtctcagaatattctgtttagtgactgtcaatttaagaaagcattaggagccatgggttcgttctagcaggtcattatccatccttagccactgacatcactcctttgtgcctcagattctctggcctttcatacttcaaaggctcgtgcttaagaggaagagaaaataagtacaaaagtctcaatgctccccaggtaagatagtttccattgggtgccattcattttcatctgcttttcataaataaacaaataagaaaatctgcaaataatagtaccacatagaaaataatacttttttgctaaaatgttatattatgtaagcattccagatgctattaatatctgtggctatcttataaaatactcacaatgtctgtaacactgaatagcaagtgcatagaaacatcaaaagaaccttcacagtaatacccaagcaaaaaatacttggcagtctaactttctatgttttaacaaggagcccagggatgcctataacaaaccactggatgctggctcaagttgaattgaaatcttcttgaaacttctgagaccctgctacatccctccctaactccccatttgcaccaagaatcctaatattgaaccctagcttcctagaaacagggatatcctgtatattcagcccccatcctcactcttagaatacagtaaaccgttgtaggaaaggaccagcctttgtttaaggcctttaaaaatcttcctgttggctctgcttccccttcccttagggccagggccagatgagctgttacgtagagagagtgaatctatgctatctgatatggtttgggtgtgtgcctacccaaatctcgtcttgaattatagttcccataatcccaatgtatcatggcagggacctggtgggaggtaatttaatcgtgagggaagttacctccatactcttctcagtgatagtgagttctcacaagatctgatggttttataaagggcttttccccctttgctcggcacttctgcctcctgctgccttgtgaagaaggatgtgtttactctcccatctgccatgattgtaagtttcctgaggccttcccagccttgggtatttcttcatagcagcatgagaaggaattaatacactaatgcctgaaggtaatttacccctccttctgacttttaggaaagtcatccaaatgccatctttccagaagcatttgtatcttaaaatgagattcttgaacaccccataatttaaaggtctgagtctctactgataggctattaccatgacaaaccactgaaacctcaaattgaaccaagtcaagggccacaaacacagtacacacataaagctgattcttctagctgtgctgttttcttggaaatgagattcaagcatgtagctggtgagataagcagctggagtctatagaaaaagtaaattgagtgctgggggaatggacttcaaattcaagttggccacagattcatggtgtgactttggaccagtctctttctttctcctggcctcactgcctccatctgtagaatccgacagtggaattaaacattcattacaatctctcctagctccaagcatttatggaatttgctttactctttcatgtccatctaccttatgattattttcctttaaaaaatggcccataaacatacattgtaagtgaaatgtctcttgtgtcctaattaggacatctaacagggtcaatatggtattgccaatgccttcacaactgtatttttacatttttaataaaatttgtgttcagctgcctatcaacattgtttttagcactggataatggttaggaatatgttccaagatgaaatggccattaagccactttctagatatgagacctttttattttgaaatatataaaagcttgttctattatgcctaaactgattacaaatagaaggccatatgaattttttttaaaaaagtatttacctgatcaaagtaattctaaattttatgtggaaaaacaaatattccaggataaaagaaatatttaaacagaagagtaaaagggggaataatcccaacagatgataaaatagataaataatagttttaatagcttggtgctggcatatgaatatatagcaattcaatggaacaaaataatttagtatatgataagcatagagtttcagatcagtgaattaatacatcaattactcagtaaattatgttgaaagaagttgctaacaactttggggaaaataaagtaaggtcactacctctttccctaaattgaaataaatcacagatggataaaagacttgacttaaaaaaaaaagtaataaaaacccaagtaaaaaatgtgaacaaaaattttagaatttcagagttgagaaggcctttctacagcaaaaatgaaacctggaattataacataaaatattcattatgtaaagaaaaggctgactatataaatatttaaaagtttttacaaagaagaaattcaaaagagaatggtaacctaggggaaattatgcaatatatatgacagacaaagaattaatatcctcaatatataagaaatatcataagtccaaaagaaaaggcaatataatgtttaaagtcactagtggatcatatacagaaaaagaaatacagatagcttttagacatttgaaaagatgttcaaatttaccttaaataaagtaatatatatttaatcattcatctgataccattttaatctatcaaactgtcaaaaattaaaagtttgatattataattttttgcccagtctgtaagtaaatagtcattctccttaattgtttaagagaatataaattagtacaccctccttggaaggtaatttgatattagttttcaacatttaaaattcacaaggtctttgatgaagtatttccttttctaggaatttactctgcagatatatttgacacgggtaagcaatatctgaaataagagactagaaatatcctaaatgtgtatgactaagggattaactaaataaattacagtgtactcacacaatgaaatacaattcagccatttaaaataacagataatgacatacagattaaatagatatataataattgctgttttaattgatatctagttagaaaaacataaacctctctagacaattcagccagaaaaggcttgggagagttgagggtgacagaaagaacaaggagccatttcctacaaattaggaagctgcaggtgttgaaaggggcaggagcaaccaaagggacacacgagtgttacccaaggaccaaaagtcagctactgccttggggcagaagcccttataccttcccttgccagtgagctgctgaaggtacttccagagtagctgagaagtagcccctcttactgttgctatcaagattactagagtaactgtttcagaggctattggaaccactgctctgccaccctcattgttactttaccaatagttctcacccacagatatgtgcagccatttgttgcaacctgccactatcactgccactatcagagttatatgtagaaaatgaggaggcagtgcgagaaggaaatgtgtgtggagtatagttttcaggcttcaagacccatgtaataaagagaaccccagaaaaaagctaaacacttacagacagcatgtgatgcaatttccaagatgcaatgttgaatgaaaagatcaaggtaaaaaacagtataaacttagtatatttctctttttgaagcatgtgtatggaaagaggagagcatctgtttctatatggagagaacagaacatgagaatctcataacagaggttgtttccaaattggaactgaggaactggagataagaggtgagaaaagacttttcatccttttcactgactgtatactcatttgtatcacttgaatttttgacatgagcacaaattgctttaaaaagagaactttatttccaaaagagaaatcattgtcataataaataataaaacacactttctcctacaactattttttcacttgaaaatattgccttttttagggcttctagaggaacttaaaatatagaacttctttttttgttgtggttaataaatttttttaatttactttaagttctgggatacgtgtgctgaatgtgcaggtttgttacataggtatacatatgccagggggtttgctgcacctatcaacctgtcatctaggttttaagccccacatgcattaggtatttgtcctaatgctctccctccccttcccccaccccccaacaggcctccatgtgtgatgtttccctccctgtgtccatgtcttctcattgttcaactcccatttatgagtgaggacatgtggtgtttggttttctgttcctacgttagtttgctgagaatgatggtttccagcttcatccatgtccctgcaaaggacatgaactcatgcaaaggacatgaactatattttgtggctgcataatattctatggtgtatatgtgccacattccagtctatcatcaatgggcatttgggttggttccaagtctttgctattgtgaatagtgctgcaataaacatacatgttcatatgtctttatagtagaatgatttataatcctttgggtatatacccataatgggattgctgggtcaagtggtatttctggttctagatcctcgaggaattgccacactgtcttccacaatggttgaactaatttacactcccatcagcagtgtaaaagcattcctatttctccacagcctcaccagcatctgttgtttcttgactttttaatgatcgtcattctaactggcatgagatggtatctcattgtggtctaacgaccagtgataatgaactttttttcatatgtttgttggctgcataaatgttttctcttgagaagtatctgtttatatcctttgcccactttttgatggggttgttttattcttgtaaatttgtttaagttccttgtagattctggatatgagacctttgtcagatggatagattgcaaaaattttctcccattctgtaggttgtctgttcactctgatgataatttcttttgctgtgcaaaaaccttttagtttaattagatcccatttgtcaattttggcttttgttgcaattgtttttggtgttttagtcatgaagtctttgcccatgcctatatcctgaatggtattgccttggttttcttttagggtttttatggttttaggttttacatttaagtctttaatcaatcttgagttaacttttgtataaggtgtaaggaaagcatccagtttctgttttctgcatatggctagccagttttcccagcaccatttattaaatagggaatcattttcccattgcttgtttttgcaggtttgttgaagatcagatggttgtagatgtgaggcgttatttctgaggcctctattcaatcacagaagttatttacccttttcctcacaagtcatggaataaagcccatcaaaacgtgtaatattgtgcccttcagcatttccaaatacgttgtcttacttgatctttgccatacaaatatgaactcattattttgtttttaagatttagaaactgcaagcccaggtaaatacttacctccaagactcagtcaatactttgcagagctgcaatttgaacacaagtctactaactccaaagcccctactactttcagttaattaaactgtctcttctatttttttcaaatctttttcctcacctgggtttttttataatgtcaaatatcttctgaataagagagctattggctgaaaattaacaacactatgattgtaagaagacttttaccctagaagtatctggtatttgcatggcctttcttgtctaaataatagtaatgatttattataataataatcaccaccacacatcaacagtaaaagtaacttctaccactaccaatggttgagtcttaattatgtgttggaaatttactaaacacattacacaagtcgtttcctttaagtaaaggaattagatatttccctttgccatgacgttatggactatactgtgtcccctaaaactcacatattgaagtcctaacctccaatattttagattatgaaggtaacttgaggcaggaactttaaataaataattaaaatcaagcagagtcatatggatacgatctaatccaacaggaatgctgtccttataagaataggaagagaaaccagagatgagagtgtcatatgtatacctgtacctatgtatacctataccatagaaatacctaatgcatgtggggcttaaaaactagatgacaggttgataggtgcagcaaaccacggtggcacatgtttacctatgtgacatacccttgtatacctatgtgaggacatgtggtgtttggttttctgttcctatgttagtttgctaagaatgatggtttccagcttcataggacatgaactcattattttttatggctgcatagtattctatggtgtatatgtgccacattccagtctatcctcaatgggcgtgtgaggacataggaaggagatggccatctgctagccaaggagagaggcctcaggagaaaacaaacatgccaacacctggaattgatttccagcctccagaactatgtaaaaataaatttctattgtttaagccacccagtctgtggtattttattgacatccctggaaaactaataaacatataagacatgataaatttcagtaagagtaccttgcacccctgaaactgatttaaagctagaaaactcaacgcaattgaagaaatcagtcatgaaattctagttctacagattctcctgcttttttcaatggctatggaattgagagattttctttatccacctgggacatatagaactaataactgtgctcaaaaccataaaaatggcattaaacaggagcttatattcattgccagtcaaatcagtatcttattagagtgttctctaacatgtaaaatggaagatgagagccttaacaaatgatcccataaatgaaagaaaatatccatagtgtataaatgagagaattctcaggacaagggacagattttctctaaaatttttatagaaaagttcgctttccacttgtgaatgataaaataaattctcaaaggggtttgcacaaaagacaactctttcattaaatattaagaataaagagctccattcaagacaatcacaaaaggccaaatagaaaccataaggtggagagagcagactggccttacctaaaagattgcagctgggaagactcagatagattcttagaaagagagcctatcacagaacttctgtgataatatcttagaaaatcaagcccgtggattattttctaccaataaaatgctgaaggaaacagagaggctgtggataaaaggaagtatgttttagatcaacctgacatctgaaacagccagttctctagtgatattttacagataaacaatatatttttattcagatgtcttagaaactgaagctgagagacctattcttcaagtccagtaacataaaacagaaacaatggtagtaatcatatttcctgaactattaagttaaatgtctgtctagcatttctgagcatgcttgagtctctgtagttcatcttgtcaggttaatcaggatgggtacttcaaattgacagggtaaccagcttttcttccagagcagctttcagcaaactgaaacatgcactttgacttgaaatcagagaaagtctctaccactcaaacccttaaaacaatgcatacttatcgaacgcctattgtgtgcataatcttcttccaggaaaaacaaacattaagaaaaagcagtccttgtgctcaagaaaatacatatggaagatatggaaaaagcaagtactgaactaatcttaatgcaaggcaggatatgagatgtcacaagaaaggtacaaataacgtgcagtggagaatcagaaaagggagaggttcatctgattgcatgatggaagcaaatcaggacacatttatagaagaggtaagttttaaaatagatcttaaggaatgagcaggatttcgacaaagatgaaaagaaattctggaagaataaaacagtaagagaaacttggcgatgtgaacatataggtttggttatagtttggtttgaggaaatgcaaataatctagtttggcagaagttaaagctgattatataatttttgagttttttttttttaacttaaagtttactaacaagaacgtgaaacccagaagccagaaaagatggacagatttagtttaaaaactaaatagataaatctgtgggctgaaagatgccactaacaaagttcaaagagaaatacttgaaaatgaaaacctttgcaataataacatgtgaccagatactatgtcagatgacaaatatccataatttccattgtatagggagtatcagttcatcacattgtaacaaatacagaaatcgttcacaatatattaaatgaaaataactatttaaaaagttcaaagcactctcctaaaagctccagaaataaagatatcacaaatgtgattaagaaatgtttgtaaaacaacagaaattacatatcaaagtgcaaaaaatgatccaaatgtattttcaaataatttatgttaaaagattttatcaaaaatttaattatatatttagactgttaaagggaactaaatatggcctgagaaggactccatacctccatatttaagtcctcatggaagaactgcaacgtagcttaataggtagacaagattgaaaccctagtttaggagtatgcgcctgtagcagtagataagtcttggccaatcccagtggccatacttcaaccattgatacactgctgtcttcaaactgtgttttgtgttcaaataaagcaaacgccaagctgtaaccaacccaaccattctgtacctcacttccaatttctgtatgtcatttcccttttttttttttttcgtccatcaatcttcttctaccatgttgctgcgctggagtctctgtgaatctgctgtgattctgggagatgcctgattcatgaatcattcattgctcaatgaaactcctttaaatttaatttggctgaagtttttcttttatcaggtggtgtaagaagcaggatccaaagttgagcttctagagatccccaggagcactgaattaacccacaaggtacctgaaggatctacttttgtccactgatctctcagagcagttggggattgtgggtaagcaccctctcagattttggagctccatggatttgtgttttgagctgagtttcttcgagcgaatttctgatccaaaccgggtttggaagttgcaacagaaactggactggatccaagaatgaatttgattgtggaattaactggcttggttccagttagagacttcttacatctgactgggtcagataggaactggtagtaagcagtaatatcactgtagttataatatttggcttttgaaaaatcattgggatttttgtgttctacccctttgtttcatttttcttgtgtacttaggtaggaaaaataatcattggctaatcgagagaacctgagagtaaagccaatattttaggtaaaaatgggatctttaattcctggaaaactgagttctttccagcttatacattaggcctgggaggcagtaaattcttcagaaatggcaaaatcttagtaatttacagtggaatgttctcaatgaacaacagattggagtacatttaaaaatgagggctctgagtgagtccctttaggctaagaatgggtttggcactctaaaatgttagcttctattctctttggattaatttgtcttacactttttgctgacagctacgggtgatagaattagatatgtacaggaccatgggacatggggagctttttccttcccaaaggggaaattgagagctgatgggactgctggaaaagatccctttgctactgacaagtggccacctgaactttttagagttgctgcaatgggtggatctttctctggcctccctgaactcatcaccttccccatcctgccataggcaatgcttttctctctctcctttccctttcttatcttttctattacccagggcaaccatctttcccagagactacatgcttaaactcctagttggaggttggattaaacataacagatccatctaagggcaaacttaagccctgacagtttaatattgggtgctaagcagaatggctaatgtctattttttcatacatattttactctggccagaacagaaacagataattttcctttgtgctgtgacttggcccccagggctgcagtgcagccagctgggtcactcagagaaaagaaacccagaagcctggcatgatagcaaaagggtaagaatttcttaccagccagacttctggtctctctctctctctctctctctctctctctcaatctctctctctctctccctctctgtgtgcaaactggttgaatggatgaatggtaaaaatcactgtttatttcctctgtaaagttttgattaatgagaaaaaggatttgtgatgctaatctctctctctttttttttttaagatggagtttcactcttttgccctggctggaatgtagtggtgcaatctcggctcactgcaacctccaccttccagtttcaagagattctccttttaagcgattctcctgcctcagcctcccaagcagctgggattacaggtgactgccaccatgcccagctaatttttgtatttttagtagagatgggatttcacccttttggcaaggctggtctcgaactcctgacctcatgatccacccaccttggcctgccaaagtgctggaattacaggcaggtgaggctaatcttaaattgtagtaatctagtgtgatttgtatgtctttctgtgttctataacgtagaggggtacctttggatagaacatgggcttaggatacctataagtccgctgttgaaaacagtccagcaaactggtaagttataaactttgctgcaggtccctgaagaaaaacaaaacaaaacaaaacaaaactggatgaggtcttcctcttgtcttgtatgtccttgggaccttgaccttgtaactatgtggctgtgctttctcttttcacagtgatggcccaggttcagtgtccaattcctgacttggaaaatgagtcctttatcttctgtctttgtatttatatgtattattatgtaatgtttatatatgaaagagctttaactaactggtttaaaaataataagagcttaaatcaaatattttgttagaaaagtaaaaagtgtaatgccttttaattatgtgacataagtaaccttggggaaataaagacagttttacaaattattggtaaaaagtcttcaaaagtgtaaatatttggtctaaattatgccagtcagatattaagtttgctaattgctttaaagtcataacctgctactttgagttttaaaaattgttcaatttattttggatcattagattctagataaggcctggggacatattaaattagccatacaccctagctatgaaaaaaaggtattaaagaggggagattttatataagaaaggatcttgtagagtaagttattgtcctaaagctaaagtaaagtaactggctgtttaaacagaggaatatttaggacaagttagaaagtcaaagtatgttgtagatggtctgtgaaagtcatgaaagaatttgtgaaaaggaatttatacaagaaatgttgtacaatttaaaggtgattaggcctcataaatgcttgataaaatgccactatgactcttaacagtacaacttacctgctttacagttaggcaaggcctgggacacggtgctggaaagagtcagaccttatctgcatttctgtctgggtccgaggctccacacctagtacataattaaaaccctgaacttactagagtttttcaccaaaagtaaaaattgctaaggattaacagtgtagcatgtataaacatttatttgaaactactgaaaaaacagttttacatgcaaggtttgtaaagaaagtgaaatgtgtttttggtaaaaaattattaaaagtaatggaagtgtgaattttttggcctaagtttagagggttaaagtattgttttaagtgagataggaaatatttaaaggtttaaacaagttgtggaaggtttgtgaaaattaaccttgtaaaagaaattctatgtgtgaaaagattggctaaatgtaaaggggtactatttggttttccataaattgaacatcaaaataaaagcacaacagggttttcttaaaacactaagctctttaacaaaaatttgtaatgggttataaaagctttataaaaaatctcaccttatagtcaagctgattaagactgtatagatttttctatgaggttttattaaaacttggggttgacattaatagtccactaatgcaaaggtaaaatttggctttccctcttgaacaagactttcatgtaatattaaaagataataaaaaattttttgtttcccccctaaatacactaccaaaaaggaaaaaagaagaagatagaaaagtcaaaaggcagattgtttggaaagctaagtcttctatcaatgagtaaaggtttttgccttcttaaaaattttcaagtcaccattttggcaaaatgaataacttatggtagcctggaattctagttcacaatatcaagtgttttaaacctttaacatattaaataggcttcccaaaatcaaatttcagctttgaaatagtcttttctgacctgtaactttggaatgctacaaaggggccctccttgaagtatccaaaagagaggtaaacagaattatttaacacattaagatacatgggaagcattgtcaaactaataatgtttaatcttcaagttatattctattgaatattaatatgttgtaaaattgtatgggattttaaaaattctaatatgtctgattatatgctatcaatcataattatggttatcatgttaagttattgtacaccacagaaataaccaaatatttttgtataaaattgctaacccaagtagaacaacaacaaaaaaattaaatactgaggaaatactttgtcagattttcacgttaaatcagccgatactgaaattgtttagatatacaatttgaactccacagtctaagtcaaattacctaagataattaaggtcttttttgaaaaggtcaacaaattaattttttagaccaaaattgacagaccactagcaagactaataaagaagaaaagagagaagaatcaaatagactcaataaaaaatgacaaaggggatactccaaactcttggtattatcctcccaatagtcataataatggcctccctggtgttctgtattctctaaagattttaaatgtttgcatgcagccatctgtagaacatcaaatggtctctcttcaactggaatgacagaagctaaaagaaatgtacaatgataaggacaccgtaacctgtgaacaatatgctgagaccagaaacccaaaatgatggtaacagggagtggcactaaggcactaagttttagtcacattctcacctaagtgagaacctgaccaaaaaggataaattttttaaacaaaattattggaggccatcatttcagactaagctcatgcactaggacccagcaggccaaaccaaactaaaatggagtcactcatgctaaatgaaacataatcaaactaagtctttaaggaaatacatagatcctaaaacagacctgttttgtttttctcctgtaaacaggctattccagcataaggaggcaccctctactcagtccttgtttctacctttgcaaaactcactgttctactgattctcagtgggtttcaagtacatttacaatggcgatagtgacatcaatagctaaagttttggtcagtctctcaaaattgagaaaatgaccacaaagagggaatggttaaagcaaatgaaatatggcctgagaagattccgtattcctatatttgagttcttgtggatgaactgcaacctaccttaataggtagacaagattgaaaacctaacttaggagtatgctcctgtaataatagctaagccttggccaatcccagtgtccatagtccaaccactcatacactgctgtgttcacactgtgttcaaataaggtaaatgctgagctgtaaccaaccaacccaatctgtacctcacttccaatttccgtacatcatttccaaatttttgtctataaatcttcttccaccacatggctgcactgtaatctctgtgaatctgctgtgattctggaggctgcccaatttgcatattgttcactgctcagttaacctcctttaaatttaatttgtctgaaatttttattttatcaagacataaattcaacaaaagaaattagaaaaaaagggagcaaaacgataaaaaaaaaaaaaagcagaatggatggaataggagatttcaatccaggaatgaataaatgaacaaaaggaaaactagggccgggtgccggtggctcacgcctgtaatcccagcactttggggcaccgagggtgggagaccacgaggtcaagagttcaagaccatcctggcaaacatggtaaaaccccgtctctactaaaaatacaaaaattagctgggtgtgatggcgtacacctgtagtcccagctactcaggaggctgaggcaggagaatggcttgaacccaggaggcagagattacatttagctgagatcatgccactgcactccagtctggtgacagagtgagactctatctcaaaaaaaataaataaataaaataaaataaaaattaaaagaaaaactaaacttgataaaatgaaaatataactccttaaaaacaatacagattaaaaaataactagtcaaattaagacaaaaatgagtagaaacacaactttagatagtgtgatatggaattattcactgagaaagtcatgtcgaatagacacctgtaagagtgaagaagaaaatcatcagatatcatgggaaagcgttctcatgagagggacagcaagtgactggtttctaatgtgttcccagaatagcaagggatcaatgtgattggatcagaggaagagggagaaagagttgaagaagtcagaaatgcagggtgagatgaagatggccttgaaggtcatgtaagaattttggattttatcctgattgaaactgatgctattagaaggttttgatcaaagaagtaacatgatcagccttatgatctaaaaggatcactctggcttctatgtttaaaataaatgaaagagaggcaagatcagaagcaggaaccacactaatctgttttcataattcatatgagcagcagcagagatggtgataaatggtcagattctaactacgtttaaactagagaccaggatgatggtaagattttactgaggtttatcatttactgaagatgggagaatgcaagataaatggctttgtgcaggctgatctggagatcatttttggatatttcaagttttagatgccagtcagatattcagtgaaaatattgagtagctattataagccaagggtgatcaaaatgacattaatgatttcctttgattttgctaaactttagataggcttcttcatgattataggccccctttttcatagagcatttacttcagaaattataaatcctttccctgcccttttgagatgtaaatcttccagcttcttgccagttttaccagccaggaatgtctttttcaaaaacctgggagccacccctttgaactataatcttcaagatagatcaatctcctatcttccaatctctgtggaaaggtaggagtcttaaataagtgcccattagcaaatacaaatgacctttttcagtagtttgactaaacccgttcttgactgtctaactccaaccagtacaattgttctttcacaagggaaaagtccatgctaaatctaaatatttgggagtcatcggtgtatccatttaaatatttactttttaacttaaatttcctacatctagcataaatatatttattttgcttaaatgtcttacaactggtacaaatatgttgatttattcagcaatcattgtaacactgtacttactaaagatgtccaagataaattacctcaacttctaaagaacttttccttgttcctggagctcaatcatagtattttatattcccaacttcactatgaacaaagaaaaaaataactcagagcattctgagctatgaggtatgtgaaaatttatcagacccggaaagacataactttaatcatgctccctgcacccacaccaagggacaattgtttaaaggatttttgttcctgacttgctgcctgtcccattatcttcatgttcctggaatttttgatgcaaagaaagatgtataaccagtcaatagcttattttactttaatgtaaattctcagtaaacaacttaggaactgcctcttcttttttttttttttttcttaaaaacccacttgtaactgctgctaacctgagcatacattaattgaaacttaaatccatcactcctgggctacagttctcaaacacggcccaagtaaactctctatttacactgacttagatttgtttttttctttaaggtctacaattgttagcattggagagcactcaagactgttttcaaagatctagagggtggaaatttgattgatgtgttgatgggagataaaacagctttgaatcttagaattctcttagaattgtccccacttctctcctcaacttgtctctcattttttgtattcggcctcacagtctcttctctttttagatgaattatcttcatgtattgtccccaccaggggaaagagagctccacacccctaagctagaattagtcccagtggaagacagtgaatggatagcttgggactgatgctataatatataggctttttatccgattcttgtctttgagatgattctcctttgttgtgagatgattcttctttgattttctgtatcaaggttaagtatagggggtgcgggccttgagtaaacattttcaagagaccaaaaggccagcttttgctttaggcaacttgagtttatttcttttacaggcaaataattttttaaaaaataatataactcgtgatttaagctattatgaataggagcttccaaaaataggtttaaggtttaaggtttaagtgaaagctgataataaaggagaaaatgcatgaataaaagaatgataataacaagctgcaaaagtataaaaatggtacaaatgttcaaaggaggtcagaagcagtgacacgatggattttcatgaacattcacttggtaaggcacaattattattagggtcagccagattacatatttaggcctcaggcctgtgagctcatgctaatttgaacagctgttcaaaagaagttcatcgctatttgacagatggagaaaatgatactcactaatggcccaagttgctttgacacagactgatttccctattgctaaaacttacttgcagtatcaattgcaaatagctttgacaatttgaacctgttcttcagtgctgacatccttaggaagaacttttcaaaatcatagaccctaatttgaaagaatattatggttattgtagccaacttccccttattctcttctaaacaagaattgagaagtggtaaactgtgggtcagatacatattcccactgtttgaaggagattgttagtcacctttgttgctgattgtcattatttggagctgatctctcctacctttggaaataaaggggatgattgcattttattcacaagaaagggatttataacatttatcatgttggaagaaacagctgtttctctttactacagcatttgctttctttcatcacataagaagtcagctgggagatgctactaaatgttgcattgaatgaaacacaaacttaagagtttgttactatttggaaataattttttgcataattgtttttatagaagagaataaaatgtccttaaaataattttttatcagaacaaagaaaacagaaaacacaattggaatgaaggctattcagtcagaaaatgtagataaaatgtatgagaattaatgcaataattgaaaaacattttgcatttctatagtaggtattaggaaagctcacaaaccagggtttaaggggcaaatttctttactctctttcaaagttacagaccagattatttaggatcctaaatcttctcagataacactttctgatgtcctttattatttagattaatgagaagcaatattgtagtaagtgcagtttggggacagagtattgtgtttgttgaattttgttgaaggccttttctgcatctattgagataatcatgtggtttttgtcattggttctgtttatgtgatggattacatttatcgatttgcatatgttgaaccagccttccatcccagggatgaggccaacttgatcatggtggataagctttttgatgtgctgctggattcagtttgccagtattttattgagaattttctcttcgatgttcatcggggatattggtctaaaattctctttttttgttgtgtctgtgccaggctttggtatcaggatgattctggcctcataaaatgaattagggaggattctctgtttttctattgattgggataatttcagaaggaatggtaccagctcctctttgtacctctggtagaattcagctgtgaatccacctggtcctcgacattatttgttgtaaggctattaattattgcctcaatttcagagcctgttattggtctattcagagattcaacttcttcctggtttagtcttgagaaggtgcatgtgtccaggaatttatccatttcttctagattttctagtttatttgcatagaggtgtttatagtattctctgatcgtagtttgtatttctgtgggattggtggtgatatcccctttatcatattttattgcatctatttgattcttctctccttctttattagccttgctagcagtctatcagttttgttgatcttttcaaaaaaacagcttctggattcattgattttttgaagggttttttgtgtctgtatctccttcagttctgctctgatcttagttatttcttgccttctgcaagcttttgaatgtgtttgcgcttgcttctctagttcttttaattgtgatgttagggtgtcaattttagatctttcctgtgttctcttgtgggcatttagtgctataaaatttccctctacacactgcttttaatgtgtcccagagattctggtatgttgtgtctttgttttcattggtttcaaagaatatctttatttctgccttcatttcattatttacctagtagtcattcaggagcaggttgttcagtttccatgtagttgtgtggttttgagtgagtttcttaatcctgatttctaatttgattgcactgtggtctgagagacagtttgttgtgatttctgttcttttacagttgctgaggagtgctttacttcatttatgtagtcaattttagagtaagtgtgatgtgatgctgagaagaatgtatattctgttgatttgggatggagagttctgtagttgtctattaggtctccttggtccagagctgagttcaagtcctggatatccttgttaaccttctgtcttgctgatctgtctaatattgacagtggggtgttaaactctcccattattattgtgtgggagtctacatctctttgtaggtctttcaggacttgctttatgaatctgggtgctcctgtattgggtgcatatatatttagcatagttagatcttcttattgaattgatccctttacccttatgtaatggccttctttgtctctttttatctttgttagtttaaaatgtgttttatccatgactatgattttaacccctcctttatttggtttctatttgctaggtaaatattcctccatccctttattttgagcctatgtgtgtctttgcacatgagatgggtctcctgaatacagcacaccaatgggtcttgactctttatccaatttgctagtctgtgacttttatttggggcatttggcccatttacatttaaggttaatattttatgtgagaatttgatcctatcattatgatgttagctggttatttttttctgttaattgatgcagtttcttcatagcattgatggtctttacaatttggcatgtttttgcagtggctggtaccagttgttcctttccatgtttagtgcttccttcaggagctcttgtaaggcaggcctggtggtgacaaaatctctcagcatttgcttatctgtaaaggattttatttctccttcaattatgaagcttagtttggctcaatatgaaattctgggttaaaaattctgttcttaagaatgttgaatattgacccccactctcttctggctagtagggattctgctgagggatctgctattagtctgatgggcttccctttgcgggtaacccgacctttctctctcgctacccttaacgttttgtccttcatttcaaccttggtcaatctgatagttatgtgccttggggttgctcttctcaaggagtatctttgtggtgttctctgtatttcttcaacttgaatgttggcctgccttgctaggttggggaaattctccgggataataccctgaaaagtgctctccaacttgattccattctccccatcactttcagttacaccaatcagatgtagatttggttttttcacataatcccgtatttcttggaggctttgttcatttcttttcactcttttttctctaatcttgtctttttgctttatttcattaatttgatcttcaatcactgatatcctttcttccacttgattgaattggctattgaagcttgtgcacgcatcacgaagttctcgtgccatgtttttcagctccttcaggtcatttaaggtcttctctacactggttattctagttagccattcttctaaccttttttcaaggtttttgcttccttgcaatgggttagaacatgctcctttagcttggagaagtttgttattaccaatcttctgaagcctacttctgtcgacttgtcaaagtctttctccatccagttttgttccattgctggcgaggagctgcaatcctttggaggagaagaggtgccccagtttttagaattttcagtttttctgctctggtttctccccatcattgtggttttatctacctttggtctttgacattggtgacctacagatggggttttggtgtggatatcctttttgtcaatgttgatgctattcctttctgtttgttagtttttcttctaacagtcaggtccctcagctgcaggactgttggagtttgctggaggtccactccagaccctgttttcttgggtatcaccagcggaggctgcagaacagcaaatattgctgcctgatccttcctctggaagcttcatcccagaggggaacctgcccgtatgaggtgtctgtcagcccctactgggaggtgtctcccatttaggctacaagggggtcagggacccaattgcagaggcagtctgtccattctcagagatcacacaccatgctaggagaaccactgctctcttcagagctgtcagacagggatgtttaagtctgcaatagtttctgctgccttctgttaagctatgccctacccacagatgtggagtctacagaggctgtaggacttgctgagctgtggtgggctccgcccagtttgagcttcccagctcctttgtttacctactcaagcctcagcaatggcagatgcccctccccccaccaggctgcagcctcacaggtcgatctcagactgcagtgctagcagtgagcaaggctccatgggtgtgggacccaccgagccaggcacaggaaagaatctcctggtctgccagttgctaagaccttgagaaaaatgcagtatttgggcaggagtgtcccattttccaggtacagtgtgtcacagcttcctttgcctaagaaagggaaatcccctgacacttgcctaagaaagggaaatcccccaacaccttgcacttccagggtgaggtggcaccccaccctgctttggctcactctccttgcactgcacccactgtccaaccaatcccaatgagatgaaccacgtacttcagtcagaaatgcagaaatcacctgtcttccaccttgatcacgctaggagctgcagactggagctgttcctatttggccatcttggaacagacctcaaatgagcaattcttaacgtaatccgtaatcttcagcccatcagaagtacatggttttctatttatttttactttagtttttttttttcctctcattatcttttaaatgttctttggacccacagacatcagaaccaattggaccatggaagatgtttacaatgtagatccctaaactgggaacaaggcactatctaacagaatctttgagagtgaaattcaaaaatatccatttaaactaacttgcccatttatgcttaataaaatggacaaattttattcaacttcattttctaggaattcatgatttatgttcttaatctcatatgttttattttttaatgtcttcatgacaaaaaagcatcacttccttgaaagggtatgtttaatttattatattctagtacttaaacaaaaaacacaatttgaatttatgcaattttacaactgagcttccctttttttaaattcccagggctataactgcttcaagccataatttatcacagttgcagaggacattagggatcagtgaattcaacctcattattttatgtgtaaataactgaagttcagagatgaggacttgctatagtcatacaaagagttagtgtctggacccatatcagaattctattgtcttggcccaaggccattgattttcattttttaacacttaaatgtgtacaaaatcttaaaagtaatatacaacagtgaaagtagagcttttaacgtggactttggtgggaagtctatgatttgattttaaaggcatttaagttttattcattgattcttctgcaatatcttttcagcataaatttgtataatcttagacatcatcaatgtattataataaaatatatctcactatgttttatttatatctcaattcatttaaaaaagataatgtcagtttacaaaaaaatacatacatacaataacaagattaaaaatagataagactattttggctgatttttatttgctgtgtcatcaggaaaagagatttggagaccaactaaacagtctccaggcttccaactttagttaagatatcctagagatggaaaggagagaagggaataggatttgttaaaatgtggatttagttttcattatttctcgaagattgacataaaaagaaaaatgcctatatatgtaatttcttctcacaacatactctaattgggcttctgtttccagcactcagatactgctcttgtcaaggacagtaataacttcctagatggtgaaggtaacagatgatgtctgatcctcttagcagtagtcaatatagctggctactcactccttcttgaaactccttttactctgggtttcaatggcaccatcttgagatggttaattttaggtattaatttgactaggccctggtagcctaatgtttatttggtcaaacaagtctggatggtgctgtgagggtattttttagatgagattaacatttaaatcagtagattttgagtaaagcagattaccatctgtaatgagaatgagtttcatccaatcagttgaagacagaactccccaagaaacagggaattcttccagcagactttctttaaactggagctgtaatggattgagtgggtggatgatattctgccaggtgaagcagcctaccccagcctagaaatgtcctcaggccaggagatctggcctcttttaccaacttgttggctggccattcagaacggtactttacctttgtgtgtgtgtgtgtgcacgcgcacgtgtatgtagtctcctcttacacaaaaataaggaagttaaataaaatgatcctttccttaaataattccagtttgtttctattactccaacatttccagcatttcatttaagagtatcttgtatttcagccaaaatcttcaaactacgtaagttttattaacactagaattttttgtaatccagacccttgctattcaaaatgtggtcagtggattcccagtatttatacttctggggaactttttggatatgaaacctttcaagccctaccctagacctactgaactgggaggaatctgcattttaataagattcacaggtaattcttatgcctattaagaggagaaaactgttatacaatggcccctactacaggtttctgcatgagctgatttcactagtcacactttgcaaatgcctagtgacttctagggaaataatatttaaatatgtactgcctttaaaaatattatatatattttgctaaatcttcatagcaatagtactaagttattaagcagttcttattgtcaccaatttacagatgagaaaatggataaattgaaatgatatgcccaaattatacagctaatagtgacagagcctatgcatctagggagcaaatgttgtctccaatacccatgcaaatatggaagatggctggcaatggtccctccctttttcaaccagcacagtttataccatgagacctgctggggcctcagctctatatcaaattttaaaatccccgtatgtactgaaaaataaatcacactctctaagtcattctgagttgagctgaaaatccaattatcacctcactagctgacattgtaaatctctcccaattctcagcaacaaagacataaccttaaaagcgctaactccactgactgagctttatgaccttctctccttctttagcttctcagcacatcctctcagagctctgatatgggttagaatgtcaagcagacaggcctggattcaaattctggccctgagtctttctttctagatatgacacaggggcaaattatttagcttctttgaaccttagattccacttctataccacagagattgtttacctattgataaaggctgttgttagaattaatggaataataaatgcacagtgcttaacgaaatctttagttcccaaaaaatagtccataatggtagttgttatcattcacctctctaagaaagttttctcatctgccaaattgacaaaattgaactgaacaatgtctaaagtcctttcatttctgacatttgaaaagtttaactcgtttacatttcatgttctactttcttattcagaattcagagctcaccttcattttttttaaagaaaaaggtagatttgtatgattgaaatatgagactgttttctgactgaatgagatttccaagaacacttaggggatacaggctagagaagttattatattttgatttgaatactataaagtcaatgagataggccatgccaaaaaactgaaatatgttctttaagttgccagagttttaaaactgctttctctaaattggaagaatgaatatcaattggtattggccttacactgaaatatcacaaaaaacaaaagagctagagtagtgattgtatgtattgtattctgtagcatgaggcctctcagagaacagggcaatcaattgaaagaaaatattccccagctggactgatcatgtgtgaattctacaagagaaaggtggttagttacttgccttcttagttacttagacatatgcccatctttgaaaatatataaaagtcttattcttaaagtaaaagaatagaaagagaaaaaataatttaaaaatctacagcatgcataattagctaccatatgctcctttactgcaatagcaaagagaaggtaccttttcatcttcacatccactgagcataactttctataaaacacttccataagagcacttaaaaatctaaattttctttttggataactgttttgttatgattgtgacccaaatgacactaaaggatgaaatgaaatagcacatcgaacgtttcttattctttcaaccttaaaatagaatttcagattcttccctttaaatgtctgatgtgttgtttaaaaaaaataaacaagacttgtttactcttttgaaaaataagaaccagaagaagttatttcctttcctcactggatatttgactctctctctctggaaaagtgctgtgtactctatcttctgttgtctacttaaattttggcaaaagttcaaaaatgtgattaaaaatataagaactcagctgggcgctgtggctcatgcctgtaatcccagcactttgggaggccgaggtgggtggatcacgaggtcaggagttcgagaccagcctgaccaacatggtgaaaccctgtctctactaaaaatacaaaaaaattagccgggcgtggtggtgcgtgcctgtaatcccagccactcaggaggctgaggcaggagaatcgcttgaacccaggaggcggaggttgcagtgagccgaaattgcaccactgcactccagtctgggcgacagagcaagactctgtctctatctatctatctatctatcatctatctatctatctatctataaactcaaaaaatagtattattttagatacttaggtgtatattaatggtgttctgcatacaggagaacagatattgttgtgattatatgacaacactaaagtttgtctttaagaaacaaggatatctgcctaatcttcttcctgacctaattttaactacaatgtatgtaaaatgaatcagaaagggatttcaaggcccttttggtctatgattgactatgcagctgtaagatcattttgtccccatctattcattaatgcagtcagatcaatgacaatgtactgggcccctgcttatatgcttcaaaggtgtcagatttattgtatctcatagagtgggagtggcaataaagtattcatatgttcaaaataagtagtcaagtcagaatttggttccaaacatgtctcactttgagatccccaaattctaatcactatgttgtacattgcctctagtaagcactggatgatctatgattattcaggcctgggatatttggtagatattttctcaaaaataaatgaagtgagactgtcacatcaagaagacagttgccatgatttgttgtcaatgatataattttatctttcatacgaaaagaaaaattttagaaaacttgtatctgccactataagtttgagagcttcccaatagctgaatcttttctgatgactgacacacctggttatcttaactataatttttgacattgtctactacattgacatctttaagatttacatacctcaggaaataaatattttccaaatgaccaacgcatgatgctacaaaactatgtttgcatctaagatccattctcagcgaaacatagaccaatggattttaaatacaagaaacttattgatatggctccatattctacattacaaatgaccattgagatactattgttcatcacagttgggtataagatgaaagaaaatcaacaattatttgaaaaggctattaaaatattctatcctttttcaactacatatcattatgaggtaaaattttctttatatagttcaagcaaaacaatatattgcaactgatttaatgtaaatacatatgttaaaatacaagtcttccctattaagccaaatattaaaaggatttgaaaaaatttaaaacaataaaacatgttaaaatttttgtaaaataattttttcaaaaaatatgttaaatcataatacatttattattgttatatatatatatatataatcaaattttttaaatgtctccagtataattctaatattggaaatgttgataaatttgtctctcataaacaagatctctttggactcctcaataacttttaagagtacaaggggctcctgaggcgaaaaagttgaaaaactgctgccctatcacatataaaactatgctataacactagattcattacaacaatgtgttattggtgcaagaacatttaagcacaccagtgaagagagctcagaaatagactcatatatatgataattcaatactataatacagtttgcattttaaattagaaattatatcagaagggtcttgacaggaaacagatggcactgccaaatgaggtaattaaagaaattttaatgaagggactatattcaagggtatgaagaggtttaaaataaattagtaggaacagagcacaccaatttgccagaaacagtgggaccctttaccttcctaggtctgaagggtcaaagggaagggcatatggaaactgggaatagaaccattcccatactagctgtaggagagggcttccaggcaggaagtgtgatctcccaaagaggatggccattgccaatcagcagaccggcagaaagggagccagggaacaaccaaacttcaatcaactcccatcctttgatctcttgctggtgtctcctgttggccaaaccaaagtaaaagatcattccagggcatgcataaaagaagttgataatggtggaaaggggatctggaggggcaggaagagaatactcaaagattaagagaatcctctcttattctttgcctatacctgttcagtcctatatacctttgccattttgtaaggaaacgcagctgtgcatttctaattttatgatccagtggacgagataatactcaagtgcactatgggcagtttggacggcaatgtctcttagtgctccagagctccccttctggagaaggcattgatggagaattgcagtatatacctgtaatttatggtttaatgggactgcatgtttgtatcctcttcaaaatttatatgttaaaaccctaaccccaagtgggatagtactgggaggtggagacttcaaaatgtaattagttcataagggtggagcccccagaatggaattagtgtccttataagagaaaaagactagagctaccactctccctacatgcactcaccaaggaaggacatgttgaagacataatcaaaaacctgaccatgctggcaccctgatcttagactttcagcctccagaattgtgagagataaatgctttttgtctgaaccacccattctatagcagaccaaactggctgagacatggttaaaaaaaaaaaaaaaaaagaacaagcatgtcattgaaacagagtccctcatttgacaaggagaccagtatctttgagaaagagaccttcaatgtaggtaagagtccattaatttcccctgcagtgacttaagccaggtttctgcttacttgagctaaaattattctgcttaaattgccaaatagccctttgataggcccatctatttagtttctagggactctgtgatcaattagccattgctaagacctctgcaggttgaaacactctgattatagtaaccaattcagaggaaatttagatattggtggtatcagacacagactttactaactaggattcatatgggcaataaattaatgaaaaatatataatttcagcagataacataaatctataataataatcaaacatagattctagaagtggaaaataaaatgaaaccctgaactcccaggttttactgaagtaaatgatgtccccactgtgtctctgacggttacacaccaccagtgtaacaattgatggttacccaccactattcttgattattattcaagaatcctattatttcccattgaaatgagaaagcctaattctgcatttcctattgttatctgttaactacagaagacagttacattgaaactttcatcatgtgggatgtctactatcttattccctattctggacaagttaatttctaggtcaggggggtgtagctaatacactgagattctttcagtaaaaaccttggagtaccctttatcaatctgcctggttagatcacatgtatcttgaattccaggtctatttcttggtttacttcatctgtttcattttctgaaaggtaatcttttttactctggctatttctttctttttgagacagaggcttattgtgtcacccaggctagagtgcagtggagtgatcacatctcactgcagcctcaacttcctggactcaagtgatcctcccacctcagtcacctgagtagctgagaccacaggcatgcaccaccactctcagctatttatttttatttttttggtagatacaggatcgccctatgttgcccaggctggtcttgaactcttgcgctcaagcgatcctcctgcctcggcctcccaaagtgctgagattacaggcatgagccactgtgcctggcctactctggctattttttaaattatctttttattttagattttcagaagttttctaagatgtacctgtatttgggtttttttgcttttgttttttggtgggttttctttttttgtatttatcttgcttgaagtttatatagctttgtgaatgttaggcacaattttttctatccattttgggaaactgtagagcattacctcttcaattactacagaatactaggtctgtctcattctgttttttccctcctcctgtaactccaattacatatacgttagatcatttcactctgtgctgtgtatctcttatattcttgtttcattttctatcctttagttgtttcctttcctcattctagagatacttttctatgcccccattctaaatcgttaatcctttcttaaactgtgtcttttgtatacttgattgtatttattttctacttctagaattcatattttagtttcacattctctactaaaattataaatttttcattaatttcttgcccatattaattctagttttaaagtctgtgtctgataccaccaatatctgactttcctgtggattggttaccattttctgatttttctctaaattttttcagtcaattcttatcttttacctgcctgctattttatttttaaatagagccctagagggtctgcataaaaaagtaagagacaattggaagttctgaatgatgacacttcttgcagacagcatttacttttaccactaacaggtaattagggtagaaactgatcatcttaatacagtgagattgaattaattgagaggcatgtttcacttattgccatgtctggtctatttcttatttatttcactttaagcaattgtctcttaggtgtctcaactgaaaactttgtgtttttaccttaactccctttggtgggtcctagaatccatttttttttcctcccagccccatgaggttgcttaacacttgctcagcttttcattctcttagttgcagctcattctttcagggcgcttctttagtatttgcaagtgtgtcaaggagaaagcagggctaaatgttaggcacaagtctttgggtttccctttcctccaggattttggtccttcaagtactcactgccctagtagctttccagtgccttcacacaggtttttaaaaaataccttatccagttttcctgcttgtccttagcaggaagaccgttcaaatgtaactactagctggaagtagaaatggtaccctcatatttggattgatggtttggttatatattgctttctagcttggaaataatttgctaacagaatattgaagattttgctgttgagaatttaaattcaattctcatttttcttttttcaattcttgctcttggttttactgtgttttgtttttttatttccgggagcatgcttccttttttttttggttgccagtttttgaaatttcaagatgtgattttttttaatcctttgttctggtcattcaaaagatccttaaatcaagagacatattcttcaactttgtgaatttatttttaattacttctttataatttctttcattccatttttactcttttctctttttgaaactcatttacctggatgtgtttcactcaggctgatattttgttttatatttcctttcctgttttagattccttttttaaaatcctattttctggaaaatttccttaactttatcatttaaaatttctactgaatttcagtttttcctatcatattttaaatttacacgccatctttcttgttctttcaaagacaatttttgcaacacacttttcttgcttcatagaaagaaactttcttttatattccttgagatgttaatgagtttttaaattctagtttttatatccctgcataatctctgatttcccccaaattttgttgttgctgtttttgtacatgttgctttctgtctttcatgataaaaactttctccagatgtctaatggcatgatctttggctacccaatcacatcatatcaacctgacaacaaaaagatttttgcaatctgtgactatgacagaaacttgttgagtgtgggtttcacgtgaggtgactgttaggtaattttctctcaagatggtgagaaacctcaaggaagacttttccatttcccttcctgcagaagtaatttttgctactagtgtcctgagagtcggtgtatttactacacttttctcaccctcaatgcacttacatttccatggcaaagagaaactcagaaattctctggagagtaaacgtcagtcttctactaacactggtgagggctaaaaatgaggagggaatctgggagctacctacttagaaaatctttcagtcgaaactgctttttatctcctcatcttcaccatctctttcagaagtatccaatgcctttgatttctgttatgaggtataacaaagcagattaacttgatagtcagcttctagcaatgccagtttagatttatgttttctcaagttggctaattcagttaccacttgtccatggattctccagcttccaacagtttgtaactattatttcctgtgttattctttgagcttgggcattggtgtatttttttataagctgtcatcttggtggaatttcagaaggtgtcaaataaagacatgaattcaaatcaccatccttagctagaagccattgtttgctttgaatagaataccagtttgtactgttttacaagtgcatgtattatattgaatagaaggcatattaggaagtaaatattttaaaattaaaggttaaaacataaatatgtaaattttttggcccagcaaatttgggtgtgagagtcagaacttacctttgagaaccaggtacatggctggaggtgaagagggactctcaggtatggaacctaaaacatttgtgtggttttatcttttaaattaataagtatgcactcaggatgtaattaaataaaaataatagcaaaagaaaaatatacacaaaatatacagtacattttggcataaaactagattatttgtggaagtgaataaatattactgatagagccaggcgcagtggctcacgcctgttatctcagcactttgggaggctaaggcgggcagatcacttgagctcaggtgttcgagaccaccctggccaatatggtgaaaccccgcctctactaaaaatagaaaaattagccaggcgtagtggtacagtgcctgtaattccagctactggggaggctgaggcacgagaatggcttaaacctaggaggtggaggttgcagtgagccgagatcgtgccactgcattccagcctgggcgacagagtgagactccatctcaataataataataataataataataataataataaataaatattactgataggacatacattttgaaagaggaaaaaacacactggtattgaaggctataaaaaactggctttttttttagggctcaattatcctatggaaaaatctatgtgtatgtataaaacgcctttgtgtcaatgggcccgccgcgtccatggagagaggctgaggcggcgcagctccagcccaaggcactgagatgcagggatgggaaagatgtcgtttccttagtccgggcaactgtctgggctttgagcaagaggaagctgcagcccacccgggcaccctcaccccgacaccttcagcagtaaacaagataaaacaattccttaaagataagcctgagcttgtagatgtaaaagttggtgtccgaaccaggggctgtaatggcctttcttatactgtagaatatacgaaaacaaaaggaaattctgatgaagttatacaagatgaagccagagtattcatcgaaaagaaagcacagctaacacctttaggaacagaaatggactatgttgaagacaaattatccagtgagttatgttcaataacccaacatgaacttgtggctgtggagtaagttaatatttgacatctcaggactcctctggccataggctccaggaaagctggtggaaaccttggggctcactgaagaaatcatgtgactgtcacatgcttaacttgcggctgccttgtaaagaaaataaagtgatgcattttgaaaatgaagccagtaagttagattccagaagaaatgacatttgtattctctgtaggggacagaaagtgagaagacatcactctctttggatcatttaatcctcttgcatcatttgttttagaaccagtttcatcaaagttgccttcctgggcacctgttcatccatttcctgaaccatgtacactcattagatctctattgaacggcttgaacacgcatccccttcagcatttctcccatccagactggcgactcctaaaatcagagacaggacgtcctgactgctggtagtaacatggcggtacattgtttttccacccaaacttaacatagcctttttacatttttatcaaaaattcactgtcagatgccttgttgcagaccctttaatagtaccaagcaaggatttgcttgaactatagtacagattagtgctgagtgatggtagcaaaaggtgagaaagacttcatccacctgtttttaaatctgtttcttttgccaccctatatgtctgctcagagatgagatctcaagctgaatttgatcctttccattgaggtgtcttttaaaagccatgtagcccaccgccctcagttctctgtgtaaggaagcaaaaccccagggaagccaaagggctcctgtccacccccccttcacaggtgagagcaggggctttacccccatctccccttccttgtaggtgacatacatgctctgccgtctgagtcagtcagtgaaggcaaatgttctgacttctttatctggtcaacattttgatagaatttccttataatttgatggaggtcatattatttttattttgagtgggaagaatactttaaaattcttttatgtgaattaccatcttgtttccttaacctttgaaacagtggtttgtagaagagaaaatattgtaacaacccagaattatgcttttggaatgtggtcctaattgcaaaggagaacatggggagcttttcttaaaattcccagtatgcaaatacttcctggttactcagtccagttgctaaagttcttacacaatattttaacctaacatttttatcaccaacttttctttaaaagtgttcctagtttctgattttcctgggtttgacatattaagaattctgagatgacatatatgcgtttttagaaagctgattctcatgaattcaagtagctgagtttctttatgtttcttttatttactgaagtagttggcacaaaacgcatcaaaacctagagcggtagttttatgtaaatgctcatgagtttgtatcattaatataattgttgatccacttataatttgtgcaatactgtatgtatgtagagattgagttgtcagtttaaaaaaatgtggcctctgtggtcattaaaaaaataaaatgggccaggcgtggtggctcacgcctgtaatcccagcactctgggaggctgaggcaggcggatcacccgaggtcaggagtttgtaaccagcctgaccaacatggagaaaccctgtctctactgaaaatataaaattagctgggcatggtgttgtatgcctgtaatcccagctactcgggaggctgacgcaggagaatcacttgaacctgggaggtggaggttgcggtgagccgagattgcgctattgcactccagcctgggcaacaagagtgaaactgtctctaaataaataaataaaatgtctttgtgtaggtacacatcaaaactttcaatttaaataaagatcaggttgagtaagatccatctaggacccaagtaacataatatgtgaataatttaaagagtttctattatgcacaagaagtttaaattataaatttagtgttggtcaagtactaattgtaagatcaagactcatatattagtaaaagctcaatagagaatagttgtgcaacataattactttggcctcatttttcttttcttttttgggcacttatagaatagcaacactgtatcaaatagtgtagtagtgctgagatacagagaagtcaatccctaacaccagatttcctgattctgctctgaaacttcttgtattgcctccaatgaatcagcaacatcctgcaattcctactcacgggcaactttgatttatctccctgcctgctgttttgcttttcatagacaacagccaatggctctgtaatttcttcaagtacaattattttagcctcagctatgcagcacttctctttttttcccctttctggtactctagtcatttctgttcttgcttgctattcctcaaaagttttaccacaccagagctgtagcaaggctttacatcgtatctaagacaattccaagtctgtctaagagagctgtgcaggggctgtttatgaatctaagttatataattagtagaagaactttccaatttactcaaatcccctttgcaattgtattgcctatgatctctgtctttagacttgaccaggtttttaactagttcatactagctttgcttttttgttgttgtttaaatggaaagtactatttattgagcacttaccaaatgttggacattctatagtcttatctcatgcacttcttccagttatgtgagatacatagggaaggttagcagcataagaaagaggcagagccagatgggctgagttagcggcctagctaggctattcactagctttgtcatcttaggcaagtatctcattctctaggagcttctggtacaaatacctcacacagtttggtgagtaaatgagttaatatatgtaaaatacttacaatacttatatgtaaaatacttataaatacttacacgtaaaatacttactttagtgagtaaatgagttaatatatgtaaaatacttagaatcgtggctgcatacaatcagcactatataaatattaactgttagtattttactcattttacaaagagagacagactcagagggatctatgctgctgaaccccgaacagctcataaacagcatcatgttaattaacaattatattattgaatggttatatatttttggacatatatgtaatttccacctttgaggtcctaaaatgcttcagtcaatagctctatatctaaatcttcatgtatactaatcctgtcccttaggataaaatccacagaataaagtccaaaagtatgccaatgtttaaggttttggtgttcattgccaaaatatctgtcacctaccagcaatacatgaaggtgtccattcccttaaactcttactaatattgggtagtattcactacttacagcaaatccacagaccttcaattttaacattatatttgtgaagagggtaattttattttttaaggtggttctttttttgctaatatttagcaagaattaaataatgccaaactgtctgttcacttagaaagtgttggccgggcgcagtggctcacacctgtaatcccagcactttgagaggctaaggtagtgaatcacttgaggtcaggagttcgaggccagcctgactaacatggtgaaaccccatctccacgaaaaatacaaaaattagctgggcatggtgatacacacctgtaatcccagctacttgggaggctgaggcaggagaatcgcttaaacccaggaggcagaggttgcagcgagccaagactgtgccattgcattctagcctgggcatcaagagcaaaaactccatctcagggaaaaaaataaataaaagtgtagataaacattcccaactattgtccctgttttctagcataatctatatcacttttgaatacgcttcccatatccagcttatcatggttagagagacactgaattgacatctacatgttatcggagtatttccattcattcaactctctctctgataagtgacatggttataagtcgcttatcaaatttggtctctttcttctaaatacgctagttgtaaatgaaatgtaagttttctagatacatctgcaaggcaaaaattattatttggaagtttttgtttctcctaaagaataaactttaaactatttcatttcagcaataaatacaactattgtttatcagcctctgaagatcttatcttcctgtctgaggtcgctgtggaagctggggtggttgccaggaaggaaacaagatggagaggataaaaaaaaatagatggatttggggattctctgctgaatggatgtttggagacatttgtgctaaacaaaaaagatattttaagatagaacaataaatttacatgcctactattcagaagttctttaaatcttagcaactaaaaacaaatgtaaaattgtccaattaaagaccagagagaggagcaaagtctatacacttcatgaccggtatcagtttctgagtcaatacttctgggtgactgactaaatacaaaaacaaaatttctgtaaagacaactatgactttaacctctgttgcatatagaaacagaataaaggtgttcaattatattagatttacacctgcatgtgtatgttgagagagaattgtgctactacatgtttaataattagctctctaaacaatgatctaatttatgacatttgccaatttctgtggtgtaaatgctcccataatggctgatttcaaaatgataccaccgaatgtggaagtgggaataggtgcataggatcaactttcacaagccagtgtgagccagctctagcataccaccatagaatcttcagaacaagtggcaatttattacattgtcacgggagtctgtaattgcagctgcctacatcactacacacaattaaacctaatgtgtgctgtcaaatgtagaaaactgcatagcaaggatagaggaataaactttcatactttctctgtccgtcagcgtctgtggtcagtgctaccatttgatctgcatctaaaaagtttcttccttgatctacggaaaataaatgaagacgaccttcttgtggctgaagaaaataaattattaacccccggagtcacagaaaataaatagggaggctttgttcaagctaaagaaaataaattaaacataaaagatgctatttcagagacaaagatttatcatttttaaagctggttgagggctagactaatattgcaaagttccggagagtagctctacactgcttccctgaaaaactcattataaaccaagctacagtcatcttctgaattgcaaaagagccctggcagtaggcaggtagtttgtccctccgcctattcttcaagaaataaatagcctcccttctttatggaagattatgcacctgttctgtttccttctcgagatgctttgcatgtatgctgtaaattgtccgctttcagctcagagacaacttatcagagaacatattcagagccatctttccaggttcacagtctcttctgcaagggttgtgggcatatcaggtgatccactcactatctacatatgacttaccattatttcaggggctgacttgtgtgtcaaagagcttaagtttaaattattatttgatatggctatatttttttgtggtgcctataaaaacagtgaaataattgagcctgagagaaagaagggctgcacacatgaatttgaaaaagggtgcattttattgtctattaaagattcctcatttattattgggtaattagtaacatcaggaaaaatgtcaacattcaaatttaggaggcagaattgtgaagaattgacaagagtgaaaaataagcaaattatcattaaaaacaatactagcacttccttgaccttggagtgtgatcttggccgatatatcttgcaggtgtgggatttagtttttacaccttgtaaatttatagctaaaatgtacagagagcttcctatgtgtcaagctctgtccgacatttgtggcatgaatcacctgatttaaatacatgaggagctcataagcagcatcttagtgagctgatggcagtttactgaggttatgagtgtcactgtcgccatcctagagagcactgttttgcaccatatgatctccagtatcctttgtttcttattaactggataagtctgcagctcctaaagtactgaatctcagtgtctagggatggggcccaggaatctacctttcatcattatccactcagatgattcttacacgtactgatgtgtgagaaacagtttttggagagtaattctatgcagaccttagtgactttcaaaggtctgaaccttcaccagcactacgttctggcccacagaaaaagctggacttttctataatgtccacattgcctacactgcattgtctacaccacattgtctacactacattgtttcaaaggcagagactccaagactgttctatgcctactgtccaacatctttcccatctcctaataccttgtgttaagccaagatttgtctttccccagagggtctttagtcaaggacatcacaagtattgccccataaagggaaaatggttgcctggatggacgcttgatgcatctttcattctttgctatcagacttcaggcctaaggaggctgccatgcagtaatagcaagaggactcagatgaaagccaaaaacatgagttaaaaatcaaatttcctccttacagtgagactttgagcaagttggtagatcttttgagcccagttttcctcaactgaaaaataaagatgacatctagcttgcagggtagttgtgagaattaaatatgatattttatgctaaggaacctcagtaattggaggcattcagtgaaaattgttgaatctcttccttgacttaattgttcagggcacacatcattcaaatcatgggaactgtaaattccaatgtgtacattgagagaatggcagatttgcaaattttatgggagttataaagcaaaatgtgattgggaccacagaggctgatatttttatttgtgataaaaaggttctgtgttctcaaggagtttgaatctgagtacatgcaaagatatgcacatgatttacttcctaatgacaaagattcctcatatgcgggcctgttgtgcttgctgttctttatacattgacttcattaattaaaaacaaatctggactttctgaatctctattgagtttaatcatatgtgcataatcaatttgtgtataagatgccacataaaatacatgtaacaatacaaatacattttgacatttactcccaaactgaaaagtatttataagtaaaataatcaaatcttttgatttctagtttcttttctgaataatggcttattcccaaagagtgaagtgagtacctgctttatgatgggtactatgttagttactagagcacttgttcccatctttgcacatcagaataaattgggtggtatttcacaaataaaatgaaattgaaagtataattaaatatacattcaattaatacagtatgaatatatacatactgtacgtatatattcatacatatatacagtatgaatatatgttgtaaagtattataaattataatacattcaatatgtatgtattataaagtataatacattcaatatttatgtattataaagtataatacattcaatatttatgtattataataaacatacatataattacaaaacataattatgattttaaaataattttgtatatgcaattataatgataatttatatttatatattaaaattataatgataatttatatttatatatcataatttatattaattatatttataaatataatttataaactataaatatacataatatatttataagctatacatatatcatttaaaaattataagtataaatgtaaatttatatttataagtataaatgtaaatttataagtataaatgtaaatttatatttataagtataaatgtaatttatacttataaatataaatatatttataagtataaattacaattatatcaatatataaatatttttataattttatataaattatacatatataattgaatatataattgaatataaatataattaaatataaaggtagactataatttaaaataaacgtaaatctgattctctgagatatgactccaccttagaaacagatttgcccccacctcagagactcaggttccatttgtctggagtaagaacaagacgctggtttattctaaatactctctgatgtgcagccagggttctgaaccactaccttagacatacaagaggaaataagattcaatcactgtcttcaagaagctgaccatctaaactcttaactggagctgccataacaaagtatcatagactgggtgacttaaacaacggaaattgttttgtcccagttctggaggctgtaagtccaagatcaaggtgctggcaaggtaggctttatcttgaagcctcttgttttggcttgcaggtggaccaccatgtcactgtgtgctcacatggcctcttctttgtgtatacatgtggggacagagagaatgagctctcgggtctcttgcaaggtcactaatcctgtcatgaatgttctactctcatgacctcttgtaacccttattacctccaaaaggccttatattcaaataccatcacattcagggttagagtcccaatttaaattttgggagagacacaaacattcagtctatcatgggataaacaggtacatagatatatcacaacattatgtagtgtcttgctataacagaatgagcatatgtcacatgcagctatatgaactgtcgttaccaggtgactctttttcattacatagataatatcttgaatcattaaatcagctgaataattaaaggagtatattatgctgcagtgtgtcctcatcaagagaaagaatctacattttgaggaacacgtccgactggttccttgagaagtaaccatggcctgacacagctgaaggtctctggattcactcagtggctcaggaagaaatgaaagttcaaagaggtaatcttaactatttttgactgagtgagccagcccctgtctaacagaagatgataagagatatcagaccttccttgcagacagtttcttcttgaagacatgctgcaaactatgtcaggggtggctgttgtctgatttctaagttatcagaagaaaaaggtttacaaaaaatgttttggaaaatttaattgaaactgcccacttcaaaaacacacttagtcaaacacaaaggtggcacctatcagcaagaaaagactttgaacccaaatttcaaattgtcagttttcctcctacaaaatagaagtagtgttagtggaacgcccatgtttccatctttgagtttgctggttgcttagtctgggaatgtatcttagtgacctcatgtccctcattacattttcaccctagctataaataagtgaataggtgaatagattcttactcatttctatttcctcaataaacaaattatatataacaacctcatatacatatatgtgtgcatgtatgcgtttgtatatatgtgtgtgatgtgtgtgtgtgtttggttccaccagagtcaaaatattgaatactttaagtacatcttactactttcaaaaaatctataaaaatttttaacggcctccatatattattgtcatttataagaaggtcacattactgaacaaactattctaaccagaacacggccagaaaccaaatattaggcacatgcaaatacacatttacacacacacacacacacacacacacacacacacacaaacactatgaacaatgttctaaagcttgtacattcaactctatgcagtttactctagagaatgccaagttcgtcatccagaactcaattactcttactttgtgtttcctagccaacagcagattaacaggaatagagactgctgtaataagataaattgtcaacagtaagtgatgctaacagtctatgtgtgagtaaatgatgaagcagaagaatgcttaaaatcagataccaagtaagatgaaaattgcagcagtcgggaccattttatcaagagattgtacatgtattttggaagtccctgagggattgtgactgttaatacaccataaagtatccagtgactgtaatgtcgactgtacatttttttggaaaatataaattatattcaatatttttgttcagtaaggtaaggaggctgattatacttagagtcataatgatttaaattgagaacattaatttgagtatccaaagagttaagatttcttcagacatctggaatcttaaagtaggcaattatttttagaaactaaggtaaataagacatccatatcttgctgataatgcaagcagtgtgcatcactgtgtttgctttttgttctgtaggcatatttaatccccaaatttgatgaagagagttgtatgatagtttgattctaactctgaaatataagctctttctgatatgctatagcagttcttaaaaacatgtgtgaggaaattcaacaagataggaatattgctttgatagaagttatttaaattaccttgaaaagataagtagaggtcatatctgctaaatgggcataacacttataggtaggtattccaacccaggggcttaaaaattacataaatacaagcaacttcctgaggaaatccccaaatttgtttattcctctaccaactagaactgtaatcttttctctgcaaaaggttgagcaactcttgaaaaaactagccagagaaatcagttgttaacagtataaatgaagactttaatcatgcatagtcagaaaccatatttgagaattatgcatttccatgtgacctaattttaggtgtcctaaaaagctgcagttgttttgctaatataaaagccttaaagggttttaaatctttctgacttagctacagatcaataaaattaatcagactactcctatgcaattaggcattgataaaaaactgtcacccattccacttatttttagacatcattagaatttcatatggacacttgctttctacatacatcttcaaaataaagtttttctactagttataaaattatatacatagatgagctgattattatattcgttccagacagaatcaatagcttttaatttagaaatatgagttatgatagttcaggtcatattatacatacaattttaaatcctaggctttttttttactgttgtttggggatattttgctgaaaatatattttccccatgttacaataggactttggttaacaccattttaaatgccacagtctattccatctaatatccactcactggtgtttatgttgtttccaaatgggccacaaatttcatagctcctaggagaaatatactgttaaatgaggtatcaataaaagcttctaagtgatgtggaggcattagctatccaatcatcaatatgtacatatttagcatctttgatatgtctcatgatgaactgggagctgcaaaaaaaatgacatagttcagaagtaagagaaagaggtgtgagtggaaatgagggggccatgtgatgatgctaagaaggacacctgtgtgggtcctgagttctgagacctggattttcattcagtgccctgtagctaatgctgggcaaattaccacaatactctgagcccattttcttcatgtttaaatgagaattaaatgaaaacatctacataaacctcttagcaaggtccctgacccagaaaatgctcactaatttccagtattatttttatattcacttgccatgtgaatctgggcaaacactgacgttgattgagcatagctctccttaaagctccctcagggaccaccagaaaaaaatgtaggagatgtttagggaaggaagataactgacacatcatacttaccagaagaaaacacattaataaatcattaacctgctacacagaagaaagagagtacctagattgtagagggaaggagttgaggagagtgacagaggaggtgcatattgagtctatttttgaaggaggaatataaggtcattagagaaaaagactgaaagaacataacattgtcaggggtcaatatgatcagaacatgggcgactatgatgagcagctgaatgtcagcctggaaaggcctgttgggttggaaagacccaatctgtcatgctgagagagtccttagtcttgccagcagaaatgcctacattaggcttgtgcagtaagtttatcccatgctcatgagagtaatccccagttgaatattatgcagctactaagcactttaaccccttgattccaagagtctataatcaagccctttaactttctcattactctttttagttagaaaagaaattgtacctgctaaagatttatcacagggctttaggagaaactacatgctattgtttctctaaatcctatgaattccagttaaatacaattttattgcattaataacactgaggaaaaaattaatttggaaaatataccttctgcttagttatagtgatagtttcaccttctcttatggttctgcatcatcagtatcacatgatgcaagaaaaatgatttcagtacagtctcctaagtttaaagctgttaaccagatgctgaagcaggtagatagcaattgatacagccagtgccttcattcatctatccatgtgttcacatttaaacatttgttgaacaaccaatagaaaatgcaaaagatgcaaacatctgtgagataggagctatgccatcaaggaggttgtaatctacattattatgaatattaatgatattatttaccgagtgcttgtgatatgccagacactaccatatattaacacattcaatcatctcaacaaccttattgaataagcagtcaataggcattacaaataggcattatgatctttattttacaaatgaaaaacctaagctacaaaaagattaattaactttcccagcatcacatagctcttaagtggcagaaaagtctaggactcaggtgttctgggtccagagtccatgatcttgctgactattctatgtagataagggatgcaatttatatgcacagataaataattgtttaagacaatgtaactgtcagaatagagataaattatgaggcccaagataagagagaaattttacctgggtagggtcatctgggaggtttccaaatggacaagttcattgagacagaattaggggaatataatattagtagtgtcggtctattgacactaactcagtgactgtcattgtgctacatatatacatatacacgtgggttagcttttataatctcctgataactctgtggagcaaattactttaattcccattatgtaggagtaagaagccaaggttagaaagcttaaataactttctcaagcttgtagacttgtgagtgtcttagtcagggttttaatcaagaaaattgacttcagagcaagtcctgatatactgtactaccttgctaggaaaaaaggaaggaagcaaatatttttgttaaataaaaagtatttttgggtaattagtaattgccacttaatttatcttattcatgaatctaacttttcaaataatatgtttgattaggtcagaatttaatttggttaaaaatgtattgaggggccattacacatcaggatctcggttagatgctggtgttaaaaatatgaatagaccaggtatgatctcaacctttgggaagtagaggagacaggcacatatgagatttgtataaggttagtagtaaaattatgcaccagatttgaaggtagctcaacagtgatttattgattcactctattgggaggcaggctgagagtgctggatcttggaattaagaagagattctcataaaaaggatcacttgaaaagtatttgaaaggaaaaacaggtgttttttttatgttggtcaagggaagaaggggcattctggtaagaggaaacaatgcattcaaaggcatgttattatgagccagcataatagttcaacacacaggtcagcaatctcagtccactgaatgaagaggtaggagagtggcaggtggtaagattagagaggcagtattaaggacatctagaaatctcatcaaggctgtatttaaccaaaacacacatcctactctgtttttaatagtaggatttaactagattaaatgacatcttccagccatatacatataatcttgacatgaaggacaactatgcctaccacatgtcactttttgtaagcatacattcagtgaacagtagactgtcccttaagtgacctccatctaaccagctctcctgattaactcttgccttccattcactttgtaagttttattaactgatgctcacaacacatcgaatactcatagcaagtaggcagttctccattgtgttcatgcacttttgcatccattagctcaattagtaatatatttggctgtgagaagcagaaaaccttagagaattaatttttctcactttacaagaagtcagagttcagcagttagagttgagtaactcaatatgccatggtcaaagacatgagattgcattgacgtcttcctcatgcaatagaagaactgctgaaactccaagtatcatttccatgtctttctcattatagaaggaaagaagtaggagaaaaaaaggttcaaatattgccaatcacattgttgtgggttttgttgttgttgttgttaaatcagaaaaacaatagcttctccaaaagcctctgcaagagtcttttctttaggtttcattagccaaaagtgaatgagtctttctgcagccatctttagcaccaaaagaagctatggaaatggggtccaagattgtaatttaacttagactattacttgcccacagtaggctatattgttactcccaaacaattttgagattctgttagtgaggaacaatattaaataaggcaaccaattacgaatgtctcacctaccagataagattttgctatcctaaattaattttacttgtttataaataaatatgtgtatatatgaaagctgtatttttagttgtggttactatatggaattaaatttatataaatgaataaactatgattatgaaaagaaagctgttttatctattaaaaataaattgtatgctttgtaataacacagctgtagtagagagaaaaatgctcccctatagatgttcacactctgatctctaaaatctgtatgttttgctgcatggcaacatataacagaagattgcagctgtaatgaaagttgctaatcagctgactttaaaatggggatgttatcctgggttatctggataggcccaatgtaataacaagggttctttaaaatgaaagaggtgaacctttgtgtcagtcagagtgatgcaatgtgagaaaaactcaactggccgttggtgtctttgatgatagaagcaggtcaggaattaaagaatgcaggacacctctagagctaggaaaatctagaagaaaatgggttctcctccaaggcctctaaaaaggaacacagccctgctgacacctggattttagcccattgggatccatttcagatttctggtctccagaactacaaggtatagatttgtttctctttaaactactaagtatgtagtcatctgctacagcagcaacaggaaactaataaaacaccataaaaactgttcttgaattaagataggaaggaagttgtaaaacatttttcagggaaatcagggaaatctaaaataactctttcttcaaattgctttgcatgtgtctttaagtttttacttacctttaaagattccaaaactgtaaactgtgaaagatgcattattggtatggtttatgcaagaaagaaaataaagaactctgctaggtttaacatactcaaagagaagcccttgactctatatcaaaggacttgcaaataaatggaaacttatatcctttttggttaaaacaaaacaagatatgtatctgtaattttataagactttctgctttcactcacttttagattaactatcatttcattcattcattatttattcatctagttattcaactaataacaatgagcaactattctgtaccagccagtacagggtatacacagagcaacaaaacatattctttgtctggaggacacaaaaaaaacaacattagacatgtttgaaaaaacatagggaaagctctaagttagatgagaaactttactttccaacaagaaaagagaaatgctatagcatccactccccgccactcaatactgaatgatgggaacaatttgggtgttaggttatttataacaatcacaggaaattgtaacagagcttctttttatgtttcttttcaaaagtactacctgtattgtttaaaatgcataccatcacatttgaaacatgtctatcacacactaaccgcaaagaaaataaaactgttttgttgggcttaggacttttcaaagctctgggagtttattatcatcaaaataaaaacccattgttcagggagaggtgaatagaaagaacatcaagagtcctgcagaagattattcatctgcagtcctatttggcagaatgtcaaatctatgcacttgtccgtgccctgaaatgctgaagtaacaatgtttggtctgatcaattttgtcttcttggattctcctcaccagctgggctaatttaccatgctgggcctgccttcaggctctgctcacatttttaatgaagatattgcctccttgcctcttacctccgaagtatcttcgctatgcttgagtggattcaagatcatgtagaagtaatggaattaggctgtcagcacagctctgcttaatatgtttttagtctgcctttgtttgagagattcatctttcttaaattctcagtgctcttcagcaccaccgaacagaataacattagcgtgcatttgtcattatatcactagttagacatacccttctttcgcaggagaaaactcagagcaatagcactcattagctacttacaataaaggcttgacaaaagccaggttggagtgtgaaaactcatttacacctgccggaaagggatcattagccagctgagtgattagaggaagtgcaggtccacaactggaaaggacaagaggattccagagtttcaagtcttgaagattttaatgccaatggtgtcgagcacttaaggattctgatcccagaatcaaaatgagttctatgacaagactgaagtgacatggttctgaattactttacagatttttttttcactctaagaagggcaaggtcaagaacatgctgttgattagaaagtaccgaggatagtgattagcagtcccttctcatacttggcatgccttgcttcaagagtcctcagtggtgtggggagattagtttttcttttctctattcctctttttgtgtgaagaggagagttgaaagataatatggtcacactggtttttgtttgattgttttgtgttgtgttttgcttttgaaatgaaactaagagatgcacaattaagtgcagagaaaatgcaacacacaaaattacagactgagtatcatggaaacccatacagtcctactctctatgtaggtagttgcacaactggcactggaattgaatctgtatattccattcaaacaaggagaatattaacatacgaggattcatgcgatacctgaatattctgtacaagaaaaactgtggaagggataaactagttaatgacatcctattggaaatacaacttaagctacctctgctgtgatatacaactggtctctctgcaaaaggggaagtaacttatgtttatcaaatccattgatgtgccagaaaccattctttatttttgtttttaatttatctttaaaactattcttgaggtaggtgttttaagcaacactttggagctgtagaactgaggctcagatcatttaattaacttctccaagaacacacaactagcatggtgagatactgttattttgactccaaaaaatgttctttttcaaatgatgttgaaagttgagtgattatgttaaatatgctctaaagtgaaactgaatgagcttttgagtatgtccatgagatggccgctcaatttgcatatagaatccattgtatagtctgttctcacagtgctaataaagatatatctgagactgggtaatttataaaggggagaggtttaattgattcacagttccacatggctgaggaggcctcacaatcgtggacatttcaccccttcagggtttagtttccttttctagcagttaaaggaatttaactaggtgaattataatgtctctcacattttaaaatcctttacaaccgtaactatgactcttagtggagagatagcccatggctccattctgagtatgtctgtatattttaattgtggtatcttagagataataccctgcgtttttttcttcctaagccttgggaatgaccaacatttaaaatttcaggccgattgatttgggaagcttgcaccatgaaaagctaattgggttgtgtttttgactgacagaggatgtcctgcaatgtacattgtgtatgttgtgacaaatgctcattctgttcatgaaaaaactgcaaaagaaactcaactccaacctcttcacagctgagaaagggagaagaaaagttttagaatggcagttctcaaagtgtgctccagtgacccctagggatgcccaagactctttcaaggtttctgaggcaaaaaccactttgttaataaaacaaaggcattatttgttttttactggtcttgttttctcacaagtgtacagtggagctttccagacggtacaggaaggcaatgacatcattcctccaacagctaaagtgcttgtgcattcttgtgatttaaagatgcctcagctttagttttgtatacagcaaaaattggtaaatatattctatatataaagaaagctctttaaggttctcaacaaatcttaggagtgtaaagattcttaagaccaaaaagtttaaaagctgatggtcttgagcatacaaaactgtagctggtatctcagttggttaaggttgttataacaaaataccataaactgggtggcttataaacagcagatattcatttctcacagttcgggaagctgaaagtttcaagatcaagtcactagcatattcagtgtctggtgagggctcactctggctcatagatagtgctttcctactgtgtcctcatgtgggggagagaacgggggtctttcctgggctgtctttgataaggacaccaatcccattcatgagggctttgttctcatgacctaatgacctcccaaaagctagattgcaatatgtaaatttggtgggggacaaaaacattcagaccatagcagctaggaattagtctaaggtttgtcctcacaaggatcccccaaaaggatgaaaaaaaatgcttgacactactgggtgcagaaaggttgctcctaaaatgcaacgtgcataagtgttggatttccacatctataaactgggatattgaaatccatctcagaaatattataccttattttatttggaatcaatacatttaattttaaatattttaccttatttcatttagaattttttagaatcaattctaaaaactattgaatacatgacgttcaattattttatgtattgctaagaaataaatgagttactaattaaagttataattagtaactctttgcctcattgattttaagaggcatcatgttttcagaaacttgagttttagaatcaatgaactacaatacataaaaatctataagtaataagtccttcccctttctttgagacaaagtctcgctctgtcacccagactagagtgcagtggcgagatctcagctcactgcaacctccgcctcccaagttcaagcaattctcgtgcctcagcctcccgagtagctaggattataagtgcccaccaccacgcccgattaattttgtttgtttgtctgtattttttagtagagatggggtttcaccatgatggccaggctggtctcaaactcctgacctcaggtgatccacccacctcaacctcccagtgttggaatcacaggagtgagcgacagcgcccagccgcctttcttatatcaaaggagtaaagggaaaagccctaaaggtatacttaatgtaattgattttagagtctgaattctttgcatccaaacatgaacagtgctatttttttttccagtcactccctttaaccattctctgtcaaattttcctttcctgttccaccatgacatctcaggcaggtagcagaactacccagtcatttccaattaaaacattccactgcatggtattccatggtgtatatgtaccatgttttctttatccagtctctgatgcgcatttgggttgatttcatgtctttgctattgtgaatagtgctgcattggacatatgtgtgtgtgtatctttataacagaataatttatattcctttaggtatatactcggtaatgggattgctaagccaaatggtatttctggttctaaatctgaggaatcgccacactgtcctccacaatggttgaactaatttacattcccaccaacagtataaaagttttcttatttctctgcaacctctccaggatctgttgtttcctgactttttagtaatcaccattctgactagcgtgagatggtgtgcagccatacaacagaatgagatcatgtcctttgcagggacgtggatgaagctggaagccattatcctcagcaaactaacacaggaacagaaaaccaaacctcgcaggttctcacttataagtgggagctgaacaatgaaaacacatggacacggggaagggaacacttactggggcctgctggggaagggcgggggtgggagccaattagcgaaaagagctgatgcatgctggtcttaatacctaggtgatgggttgataggtgcagcacacgtttacctatgtaacaaacctgcacatcttgcacatgtatcccgaacttaaaaaacataaataaaaaataaaaagataaaatttaaaataaaaaaaaaataacatttcactgctatcaagtttaaaacttcagtctccacattcaggtttgacctgtggttcaaggaacccacaatagtcccagcttctccagggttggagcacaatggggggaatagagaaaaaacaatcgtaattattttcacctaatcaacttcatgattaccgtctggtttgtgtttgctgtttctctgtctcagaccctccttgacctaagaactgtggcttaggctcagtctctttcactccacctcagcttctatcaccacagttactcccagcacctcttgctggttggaagattttggccaacaacactgccttcttgggtgggccctcacacacagaggtgaagtcctgctacctgacatttgtctgcccctcagaaatgcatgcattcttgccattcctagcaggaggcacaggctgcaatgccagttttcccattacaggtgccccccctcaaatctctataaatgcctctctcttaagtttctcccatctacttgattttaaaggaaagaggacctacatatctatccgtgagatccctactcacatatacctctgattcttgctcttcccctctctgttatatgacctgaaggcagaaaggtaaggagagcaaactcagctggcttttcataaaggctgagggatatgtatggccctagatttgtggctccttcttagctctgtccttagaatgttgagtactcaatgcatctttctcccaagttttggatgccttttaccattcggagtaaataggtgaagtctcatttaacatttcttccattaaactgacttaatatagaagagctagccctgacctctttgttggcagatttaataatacaatcttcccaccgattcatccataactcacttcaaatctaggttcattggagttgctgaacaagtggaggtgctaactgcaatagaagggctccctgaggagcctcagaaccagcaccattcccaagccctgcaagcatctgttccattctcagaaatcacaacaatccacactgatggaaagtgagggagagaaaaattgacaggtctgtgtttttttggttgaataatcattgttgtcctaactgtttaattagaaagaaaggaaaaaagtctctttcaggacgatcgatgaagaaaagctacccaccctgaaaaaaaaaagcttttttttttccttctagagcctttcagttgtcataacaggcaccaaccttactttatatattttgataagagaacagttgggaattgaggattgagaacaatttaatttatcagcaaaatttttctaaaggagttttggcaaggtgctggttctgagagcaacaacaggtgctctgaaggcaaagaagaaggaagactgagtgaacttcattgcagttctggaatataaatcttcaggtgagaagtgtgtagttttacttgtcttaaaggggacacacacatatattgaaccagccttgcaaggagagactccaacactcctttcacataattaatttcctctctagagctcaaaaaagttgttaactgaatccaaacgttactaatactgttttaatttttgtcctgaacaaatttttacttgcctcagagaaagtatatatggcacatcataggacagaagaaaaccttgcaattcaaagactctaatattctttctatttgcttgaactacaaataagcaataaaaccaacaaaaattaaattcttatgttaaagctcgtaataatatctagaatttcttttaactcttcacagtttataaagtgctttccctgatatgaccacatttaaatcttacagcaatcctgtaaaattgctatttactatctcaaattttacagattaaaaagcaatcttacacagtggaagggacctactgaacaccatacagccagtaaatggcaaagttcctgcttgaaaccaggaatcatgaatccatttctccaaaccacatttctcttcttcattagctaattgaactgcctgatattctttcaacctgttcaacttagtttgtaatacctagagcccacttaagtcagcagactcacctcactatctcctcaacagtagccatcacagtaaagacattaattaaatctgtgttttataaaagaatgtatatttattgagaacacatttcaagtgccttgctaggtgttttaatgtgtttaatttctcataatctttaaaacatctctataaggtgtcatccttattatataggtggggaaacttaggcttagaaaggttaaagaactttacctattactcaactaaactgtataaggaaacttgcatgctatgtttatttctctgtttctcttgctctccctatacctctccccaagtctctgaatctgcattatccaatacaataatccatagcaatgtgtgactgttgagcacttgaaatatgactagttcaaattgagatgtgctactaagtacaaaatacacaccagatttcagaggcttaaatatgaaaaaataatgtaaaatgtattattactatttttatgtcaatcatatatatatatatatttattttactttaagttctgggatacatgtgcagaacgtacagctttgttacataggtatacatgtgtcatggtgatttgctgcacctaccaacccgtcatctaggttttaagccctgcatgcattagatatttgtcctaatgctctccctccctttgcccccactccttgacaggccacagtgtgtgatattcccctccctatgtccatgtgttctcattgctcaacacccacttatgagtgagaacagtcaatcatatattaatatcatactgttttggataaattgagttaaatataatacacagtcatgcattgttttattatattatgttttattgcactttgtggacattgcgtttttcacaaattgaaggtctgtggcaaccctgcattaagctagtctgtcagtgccattcttctaacagcatgtgttcacttcctgtccctgatgtcacattcacattttggaaatgtgatgcagacttatttcagacttctttattattatatctgttatggtgatcagagatctttgatgttaatactgtcattattatgtggcaccatgacctgcacatatatacaaaggaaaacttagttgataaatggcgtatgtgttctgatttctccactaaccagccattaaggaaagaagtcatctccacaacataaagtgcaaagtgaagcagaaagtgctgatgtaaaagctgcagcaatttatccggaagatctagctaagatcattaatgaaggtggctacactaaatattagattttcaatgtagaaaaaatagccttctattggaaggagatgccatctaaaactttcatagctagaggtaagccaatgtctggcttcaaagctttaaagtatgggctgactctcatgttagaagctgatgcagctcgtgactttaagttgaggccaatattcatctaccattctgaaaatgctaggacccttaagaattatgctaaacacagagtactgcctgtgttctataaatgaaacagcaaagctcggatgacagcacatctgtttagatgtgcatggttagcatgccactgattagcatggtttactgaatattttaagaccactgtttagaactaccgctaagaaaagaagattcctttcaaaatattactgcacattgacaatgcacctggtcacccaagagctctgatggagatgtgcaaagagattaatgttgtgttcttacttgctaacacaaaatatatttggcagcccatggatcaaggagtaattttgaccttcaagtctaatttaagaaatacatttcataaagctatagcagtcttagtaatttctctgatggatattggcaaagtaaattgaaaaccttctggaaagcattcaccattctagatgccattaagaacatttgtgcctcattgggaggaggtcaaaatgtcaacattaacagaagtttggaagaagtttattccaaccctcatggatgactttgaggaattcaagacatcggtggaggaagtaacagcagatgtagcagaaatagtgagacaactagaattagaaggagagcctgaagatgtgactgaattgctgcaatctcacgataaaccttgaatggagaaggagttgcttcttacggaagaggaaagaaagtggtttcttaagatggaatctcctcttggcaaaaatgctgtgaacattgaagtgacaataaaagatttagaatattagaaaaacttagttcataaggagtggcagggtttgagagaattgattccaattttgaaagaagttctatggtaggtaaaatgctatcaaacatcaatcatcacatgctacagagaaatcattcatgaaaggaagagttggctgggcacggtggctaacacctgtaatcccagcactttgggaggctgaggcaggccgatcacgaggtcagaagttcaagaccagcctgaccaacatggtgaaaccctgtctctactaaaaatacaaaaattagccgagtgtggtggtacgcacctgtaatcccagctactcagaaggctgaggcaggagaatcgcttgaacccgggaggtggaggttgcagtgagctgagattgcaccactgcactccagcctgggtgacagagggacactccatctcaaaaaaaaaaaaaaaaaaaaaaagaagagtcaattgatgtggcaaacttattattgtcttgttttatgaaactgccacagccatcccaagcttcagcaatcaccaccttgatcagtcagcaaccatcaacattgaggcaagaccctccactggcaaaatgattatgactcactgaaggaacagatgattatttgcatttttaacaataaggtatttttaactaaggtatgcacagttttttagatgtaatagtattgtatgcttaatagactatagtataaacatatattttatatgcactggaacactaaaaatttatgtgactctctttattagatattctccttattgtggtagtctgtaactgaatcttcagtatctctgatgtaggcctgcattttgaaaatgacccaaaaagcaagcactaaagaaaccataaaattaatatatggttaataactccattttggctctgcaatttcttcagattggggatgggatctgttctcttggctttctttgagtgttcttggttcctggctgagaactgtgctacatacaaactctgctgataatctttcttggagtatttgtattctgtgctctgctctgtcatctctgtagtcttaaatgctggtgcctagctgctgtcccctaaccactgtcccacaaaatgagtacggaaaaatctgcttcttattagaagttaaaatggccatcctctagaactttacttgtaataatgacacctcacatagtgataaccaactgaattgattatattatcatatttaagagtgtgttctccaatgtagggagaaaaggaggtctgagaactgaagccatctacaaccacagagctaactgcaccagtgtgactttactatcccatgaaaatcttgtctgtgaagatgaagttgaaaatgtctcaggaacttactgcaaatccatttattcagataatagaccactcaaccagccctcatagagtttatagcccttcttaggacaatagactattcaactaggctcattaaacaactctttacattttaagacttgcttccaaagcctcctcttactgtatttaccaatcctaaactgttatgtcactaatttgctcaatcccaattaggtctccacactgaaagctccaccttaaaacagacccctcggccgcatgcagtggctcacgcctgtgattccaacagtttgggaggctgaggcgggtggatcacctgaggtcaggagttcgaaaccaggctggccaaaatgacgaaacaccatctctactgaaaatacaaaaaatagccaggcacggtggagggcacctgtaatcctagctactcgggacggtgaggcaggagaatcgcttgaacctgggaggtaagggttgtagagagctgagatcgcaccattgcactccagcctgggtgacagagtaagactctgtctcacaaaacaaacaaacaaacaaacaaacacagaaaaaacaaagaccccttccccttctaaaattgtataaatattttgcctttgttcttctccctcctagatatgaataagactttgtttcctttaccatgggtgagcaaaaaattcagctttgcttaatcagcaagttttattttgttggcatttttggagagttgaccctcaacagcttgcatatgagaaacttatttacttactgaacaccacatagctgttcagatttattttagaggtcataaactcagaaagaagtagatcagaaagaagtagatccaggctgtagaccaattttgttgagcttaaagtgttaagtcactcatttaaaaaaacagattagtagctaacatttaaaaaattgaaagttatatgtaaaatctggatttctggcttttttcaaatactgaactgggcccgacttttctacatggtaataattgttaggtgcttcagatgtagagtacccttactgcttcggcatagttcttgccacttactgtttacatctggcttgttcatttacatcaggggataaagactaaatatttttggctttgaggaccatatggccgctgtctcaactactcaactctactgttgtagcatgaaaacagcaaaaggcaatgtctaaatgaatgagtgttgctgtgttccagtaaaactttattgatagaagcaggtctgaaggttacaatttgtgattcttgaatctgtgtaatatgcctggctacaggcagcatttaatttgaaaccattgtttatgattgaaccaattctggtctggctttatggagatgcctattaattctgaagagaaaagggctgtagtgtaaaattaacaaattgtattaggagagtttaagtcaattaattatgggactgctttttcctaaaaaacataacgcaagaaaggaaagctgtcattacaaatggcttgagagaaaagtgagcatgagagaacaaaggtcaaaatggagcagcttgaccatatgtgttgctgatgtggaaaatcagctgtttaaagaatattcaactagcatttgtaaatatcgtatatatgttagcagctggttgtttctaatatgcatgaaaaaatatagatttgtttaaaattaatgttaaatgttgatatagctagaaaaatagaatctctttcaatagcaaactttttggcccatataaattatgattagatttgtaaaacttcaatttgcaatgatttttccagcagcaaacttagggcccagagccaagagataataccaaatattatctgaaactaccatatatttaacattttcaaaaggaatcaggccaggtgccatggctaacatctataatccccccatgttgggaggctaatgtgggaggattgcttaagtccaggagtttgagatcagcctgggtcatgtatcaaaaccccgtctctacaaaaagaaatgaaagtagccaggcatggtggtatgtgcctgtagtaccagctactcaagaggctgaggcatgaggattgcttagtccaggagtttgaggctgcagtgggctatgatggtgccacggcactccagtgtgggtctctaaaaaaggaatcaatttgttccaattatcataaccaaaatagtgataataataatacattattgttactcttagaatccacaaaacaaattacagaattcttcaaaattagccaaaataaaatggaaatcttttgaattgtgaatgtaaaaatatatatttttaaaacttgttaattcataattcactaattcactcctttggaaattctgaaacagctgggataaaatcaatatttggctagaggtgaaaatgacttggtaagaaatgcttgtgtatttacaagtttaagtacatttctctttaattgcattggtgattttgtggcattctcagttgcattgctagtctttctaaacaagaggcacatttttgctgccttaatttcttctccaccaatttttcttttagcctcttaaaaagtagtttctattcccaccactccattcaagctcttctcaagaaggccactttctagccttcttatttatacgtttattaatcttttgtcaattctctttttcctgaatctctctgctggatccctgaagtttttgccatcttaaccttttacaaccagtaagttgctgttattctttcatcatttcagcaccctcttttgttgactctattctttcttctacagtctagctaagtactcttcaagtatccatctttggctgctggtctccactctcttttactcttgtccttgagaatctcaaggacttcaaaccctctctattgatttacagtattgtcctcttgcaaaggctacattcctttatttctgctttctggaaatgtccataattattgctataaagaacaggagcatcgtaactaatataagccagatgacattttttcttccctcttgctatatgagaatggtggatattgaaattatgtgcaccattcctaaacaagatggtaaaaatatcactgtgccccttttctgtatgatgtttacctgcttgcactgatggaggtaaatttaatttatagattacctgtttggaattattttatttagaccctgttcatatattggtttatctaggatgtagtgggaataagctgtatctaaatgcatattttttgtccctagaaaaataataaagagagttatgacagtgtttggagttttggccaggaagttactgcagtctcagatgcagggggcagggatatccctttcctaatccaccagtttgagatacaggtattccaggattgtagatgctttcaacttcagtcaggaggtcaaagcaatggaaaaatgtagtttttacattgtgtttaataaagaatgatgtagtttctgcattgtacttaataggaagtaaaaaaacatgccaatttaaaaggctgaaatttaaaaatttctcagtacaactacaaaaatatgaattttgtctagcacactagagaatgtagtatgctaccttcttaccaaatctaaaatagatacattgccagtataacagtctcattatatctaaaatccagtttatcctttttttcttttttcaaaattatgcctctgtgttacttctccctggctatccaccaaccattcttttcctaactaaagcagtgaataataatacatattatgaaaacataataatgaaaacaacacttaataaatgcattcacttttccagatactgttctaagtgtttaagtctcatcaaaaccctttgaggtcaggaaatatttattattatcccactttataaatgacatttaaggtgaaatgatacgctgaagataatatgagtgttatacaatagagctgagatacaaacccagccaatcttacatcacatacaagcttctcttaactattcaaaatatggcctctcaaaacaccaggtcacccttggaagatcatttagtctattgaaaagttcaggcgggtactgcctgtgttaatttgagttaaaatctagctccattgttttcatgctgtgtgaccccaaactaatccttaaacttcaagttaattacctattaactgtaactaattattccagctttatggatgtctttaaaagcttgatttaattattccacaatgtaaacatatatcaaatcatcacattgtaccacataaatatataacatataccattattgtcaattaaaaattaaaaaaacaattaaatcacataattttttttaagtacttggggaaaaaggaacttggaatatagccatttaaccagtgttggttttcttcatatcctacaatccacgtatctaattagttgccaagttctgttgaatacgtagatcattacaatgtatttcatactcatttcttcttttcaatcattatatccttattgcaaataaaataaaaacatcttcaatggctctccaccctggacattactgattctgtattctgtcattcagttttcctcattgtctggtcctgaatttatttcattaacctatttcctatggctcccccagtgaaccctctattccatttgggctggaatgtgcttctgttattcaccatccaaatgtgtttatgtgagctccatctcaatgccttgattacattgtgacctctgttttctgtatcccagaaacaatactgtatacaggacattaggaaaaagaaagagcattttctcctccattttctggttataaactcctttgttggggaacttggaagtccttgctatggtctcagattttagaacaaaagccagtgacaaagctaagtcaaccaaggtgttaattgggttttaaaatctattaaacaacttggttctatttttcacatcagaaatgtacagataccctcttcagcataaaactgaaaactgccttggaagggaagagaacggaaaattagaatttcaaactatattcttaccctacctcaatctttaattttaaggtaatcatggagaaaaataaggaggtaaattatgcaagcaaatgcaacaatgcagctgttttaaaaaatatattctacaattcaaatttctactaattgaggttagccttcctcccaataaaattaatgaacattgctcctagtttgctgggcaataaatggtgtaggaatgggggagctgatggccatgacttggtgcaggtaagataaagcaattgttactggaaatattagatttactcaaatattatggaaaattcaggtattaagacaaaacagctgggtctgcagaggtgtggattgttttagtagtagtcacaagttgttgagaatttgggaataagctaaatcttgatcaatttaatcacatttttaactttcttgcaaaaaagacatagacattctaatgtaatctttttcaaaggacagtctttttataaagcaaagacattgtgtagaatttttcatgcacaaatgtagatttctgcctattgactctgcctcaagaaagttacgttagttctagaatctgtcatgtttttcaaagtcatgttaaattggatccttggcacttcttcctcaatcccccaaaatgtgcttgaacctgaacaggtttcttcccataagtgaacaggccataaacaattaatatattctagtgaaaatatcattttagtgacccagggtgatgcaaatattattgcttaggatttattttctctcccagttctttcttcgctgtattttgaggcagggcaatattatctataactttagatttccagtgatgacagaatctaataaaagaggaacagagtatttggtaattatgtcaacttcaaagtcaaaaagttatagcaaatgagtaagaaatgaaggctcctatccagaacctgctttaaagctggaattaatattgatgtttctccaagcacaaatactgagaatatggattacagaaaatgatgtctgagatgaagattttatgtttgaagaatacgactgatactaacgaccatgtaaatacatttttaaagtcagtcagtcaatttagagtagatgtcgttgctgtgagtctctttgaactattcatgtttgggaagtttggattcaagtcagtgaacctgagtccaacccctaatcctaacgcctcttaactagataactagtccttatctaggactattagacaagttatgatgcttctcttaaccccaggtttcttggcagcacaatgaggataataacagtgcctgccttatagggtaatgggggatgtttgaatggtaatatatgtagaaaatatttttcaaactctaaaccctattatttagatttttcattagtaaaatagtttgagtcattttggaaatatcaccaactgtcagtaaatgttacatttacaatctcccatctagaaaataatttcttacttgctcctctgtttctagtttgtcccatttaaattcaccacttaacctactgccagggtgctctttctccctccccttcctctgacccctactcctccttttcctccttcttctcttttttcttttcttgcttctcttccttcttctcctttttcactttctcttccttcccctctgcttctaatattgtaaatattataagtagagttaaggaggattatataacagacatttattttcccccacttattttatcagatcttaatattttactgtattttcttcagaactttaataagctaaaacatttcaattgaagccaattgtatctcattcactctctacttagaggcaactgccatcatgtcttagttgaaaggaggctaaaaattccatcactgtcacttactatctgtataacaagacaaattactttatctgtgcttcggttttcttatctatgaacttggagtaataatgataaatatcgcctcgagtggctgttgtaactaaatgatagaattaaacatctgtaaatcattcacaacagtgcatgacacttatgagactcaaaaaatgttataattactggtagctgatgtagtagatgcatcatgaattttggtgttttatcattctcacgtatatttttgtaactcatatatttgtgtatcttacatagtgaaaatatgcattttttaataacttggcataattggcatcgcatatatgtatcattttacaatgtccttgtcttgttcaacgttaggtttttgagatttatttatgttgttaattacatttttagcttatttatttttactactttacagtgcttaatgacattatataaacataccaccagttatctattgtcttgtaaatggatatttgagttgtttctaattttttggttgatgcaaataaggttacaataaatagcattagttgtgaagcctttattacatgtattgaagttttcatacagactatgcttgcaagtggaaatgctgggtaagagaatatacaaacttccatcttcactggtatgaccaaattgtcctcaatggtggttatattaacactcattctttccaataacatgtgagaattcctgtttttccacacacaagaggaagtgttagacacttaaaattttatctgttagaatgggtatcaaatgtatttccctgcagccttaatttacatttactaaattactagcaaagctaagagtcttttaaaatgcttattggccatttcagtttccttttctatgaattacccattcaaatcccttgtcctgttgactcttgagttgtcttcggatttgcaagagttctttataattctgggtactggtaccttttcagttagatatatttcaaatatctgagattctgccttgtcctttaactttatttttagtgtttttgtttgaacagagtttgacattttaatgtaatcaaatatatcagtcttttcccttttcatgtcctactttttaaaatgtcctacttccctaagatcttaaatgtgttctcctgtatattctttggacattttgaagttttgtttttggtcccagatcttcaatctacctgaaatttatttttgctaaagatactaatggaaactaattctcttcttctttctacttgatttaccaactgttcaaacaccatctactacaacattgttactttcttcctgaatattataaaacataattattataatgataatgctgtgggatatatatatgagatatgcattttatgatatgtattttttcatttcttctaaaaaaatgggacatatgtgcagaatgtgcaggtttgttacacaggcatacacgtgccgtggtggttcgctgcacctattgactctcctctaagttcctcccctcactcctcaacagacctggtgtgtgtctctgtgtccatgtgttctcattgttcaactcctacttatgagtgagaacatgcaatgtttggttctctgttactgtgttaatttgctgaggaggatggcttccagtttcacccatgtccctgcaaaggacatgatctcattcctttttatggcagcatagtattccatggtatatatgtaccacattttcattatccagactatcattgatggaccttggagttggttccatgtctttgctattgtaaatagtgctgcaataaacatacgtgtgcatctgtctttagagtagaatgatttatattactttgggtatatactcagtaatgggattgctgggtcaaatgatatttctggttctagatccttgagaaatcaccatactgtcttccacaatgggtgaactaatttacattcccaccaacagtgtgaaagtgttcctatttctccacagccttgccagcatctattgtttcctggctttttaataatagccattctaactgttgtgagatggtatctcattgtggttttaatttgcatttctctgataatcaatcatgttgagctttctttcatacgtttgttggccaggttatgtcttcttttgagaagtgtctgttcatatcctttgcccactttttgatgggattggttttttcttgtaaatttgtaaaatttcttttaaatctggatattagacctttgtcagatgggtagattgcaaaagttttctcccattctgtggactattcactctgatgatagcttcttttgctgtgcagaaactctttagtttagttagatcccatttgtcaattttggcttttgttgcaattgcttttttgtgtttttgtcatgaagtctttgcctatgcctatgtcctgaatggtattgcctaggttttcttctagggtttgtatggttttgagttttacatttaagtctttaatccatcttgagttaattttatacaaggtataaggaaggggtccaatattagttttctgcatatggctagtcagttctcccagcaccatttactgagtaggagatcctttccccattgcttgtttttgtcaagtttgataaagatccgatggttgcagatgtgtgctgttatttctgaagtctctgttctactccattggtctatatgtctgtttggtaacagtatcatgctgttttggttactatagccttgtagtatactttgaagtcaggtagcatgatgcctccagctttgttctttttgtctaggattgtcttggctataggggtcttctttgattccatattaaatttaatgtagttttttctaattctgtgaagaatgtccatggtagtttgatgggaatagcattgaatctataaattactatgggcagtatggccattttcacgatattgattcttcctatctatgaggatggaatgtttttccatttgtttgtgtcctctcttatttccttgagcagtggtttgtagttctccctgacaaggtccctcacatcccttgttagctgtattcctaaatatgttattaactttgtagcaactgtgaatgggagttcattcatgatttggctctctgtttgcttgttggtgtaaaggaatgcttgtgatttttgaatattgacttatatcctgagactttgctgtaattgcttatcagtttaaggagttttggggctgagatgatgaggttttctaaatgtaaaatcatgtcgtctgcaaacagagaggcaatttgacttcctctcttcctatttgaataccttttatttctttcttttgcctgattgccctggccagaacttccaatactatgttgaataggagtcgtgagagacggtgtccttatcttgtaccggttttcaaagagaatgcttcctgcttttgtccactcaatctgatattggttgtgggtttgtcataaatagctcttattattttgagatatgttgcatcaaaacctagtttattgagagtttttaacatgaagggattttgaattttatcaaaggccttttctgcatctattgggacaatcgtggtttttgtttttggttctgtttatgtgatagattacctttattgatttgcatatgttgaactaacctttcatcccagggatgaagccaacttgattgtggtagataagtttttttttatttgcagctggattcggtttgccaatattttattgaggatttttgcatcaatgttcatcaggaatattggcctaaaatattttttttgttgttgtgtctctgccaggtttggtgatgctggcttcataaaatgagttatggaggagtcccttcttttcaattgtttggaataggttcagaaggaatggtaccagctcctctttgtatttctggtagaatttggttgtgaatccatctggtcctgggctttttcttttttctttttttttttttttttggatggtaggctgttaattcctgcctcaatttcagtagttgttactcgtctattcagggatttgacttcttcctggtttagtcttgggagtgtgtatgtgtccagaaatttatccatttcttctagattttcttgtttatttgcagagaggtgtttatgctattctctgatggtagtttgtatttctgttgggtaggtggtgatatcccctttatcattttttattgtgtctatttgattcttctctcttttcttttttattagcctagctatcggtctatttattttgttaatttattcaaaaaaacagctcctggattcactgactctttggagggtttttcatgtctctatctccttcaactgttctctaatcttagttatttcttgtcttctgttggcttttggattagtttgctcttgtctctctagctcttttaattgtgatgttagggtgttgattaaagatctttatagctttctgatgtgtgcatttagtgctataaaattccctcttaacactactttagctgtgtccaagagattctggtacattgtctttttgttctcattggtttcaaagaactactttatttctgtcttaattttgttatttactcagtagtcattcaggagcaagttgtttaatttctatgtaattgtgtggttttgagtgagtttcttaatcttgagttctaatttgatttcactgtggtctgagagtctgtttgttacaatttctgttccttttgcatttgctgaggagtgttttacttccaattttgtggtcaattttagcataagtgccatgtggcactaagaagaatgtatattctcttgatttggggtggagagttctgtagatgtctactaggtccacttgatccagagctgagttcaagtcctgaatatccttgttaattttctgtctcattgatctgtctaatattgacagtaaggtgttaaagtctcccattattttgtgggagtctaagtctctttgtaggtctctaagaacttgttggttatgaatctagttgctcctgtattgggtgcatatatatttagaatagttagctcttcttgttgaattgttccctttaccattatgtaatgcccttctttgtctttcttgatctttgttggtttaaagtctattttgtcagagacttggattgcaaaccctgcttttttgctttccatttgcttggtaaattttcctccatccctgtattttgagtctatatgtgtctttgcacatgagatgggtctcacgaatacagcacaacaatgggtcttgactctatctaatctgccagtctgcatcttttaattgggacatttagcccatttacatttaaggttaatattgttatgtgtgaatttgatcctgtcattatgctgctatttggttattttgcacactagttgatgcagtttcttcatagtgtcattggtatttatattttggtgtggtttttgcagtgactggtaccggttttgcctttcgatattgagtgcttctttcaggagctcttgcagggcaggcctggtgttaacaaaatccttcagcatttgcctgtctgaaaagcattttatttatccttcacttatgaagcttagtttggctggatatgaagttctgggttgaaaattattttctttaaaaatgttgaatattggcccccaatctcttttggcttatagagtttctgctgagaagtctgttgttagtctgatgagcttccctttataagtgacctggtctttttctctggctgcccttaacatttttttattcattttcaccttggagaatctgatgattatgtgtcttagggttgatcttcttgtggagtatcttaatggtgttctctgtattttctgaatttgcatgttgacctgttttgctaggtttgggaagttctagataatatcctgaagtgtgttttccagcttgtttacattctcctagtctccgtcaggtactccaatcaattgtagtttcagtctttttatgaagtcccatatttcttgaaggcttggttcattcatttttattattttttctttagtcttgtctgcatgccttatttcagcaaggtggtcttcaaactctgttatcctttcttccacttggttgatttggctattgatacttgtgtatgcttcacgaagttctggtgctgtagttttcagctccatgaggtcgtgttcctctctaaactggttattctagttagtaattcctctatccatttatcatggttcttatcttctttacattgggttagaacatgctcatttagctcagcacagtttttttattacccatcttctgaagcttacttctgtcaattcatccatctgatcctccatccatttctgtgcccttgatggagagacattgagatcatttggaggagaagaggcgctctggccttttgggttttcagcattttttcattgatttttttctcagctttgtgtatttgtttagttttggtctttgaagctgctgacccttggatgggggtttgtgggggcttttgttgttttgttgttgttgttgcttcctgcttgtttgtttttctttcagtggtcaggtccctcttctatagggctgctccagtatgctgggggtaagcttcaggccctattcatcttatgcattcccgtgcctggagatgtcactcaaggagcaaagattggtgcctgttccttcttctgggacctgtgacctcaagaggcgccaaactgatgccagtaggatcactcctgtgtaaagtttctgacaatccctgttagagggtctcacccagttgggtggcatggggaacaggacccgtttaatgaggcactttgtcccttggtggagggcttgtgcatcctgagggggaaacccacttgtctgggctgccctgattccttagaactaccaggaggaaaggctaaggctgctggattgcagactgtggccaccccttcccctcagggctcaggcccaaggatatctgggttctgtccctcagcctctgactggagttattggagttcctgcagggaagccccaccagatgaggaagtatgagtcagggtcaggcctgaggaggcactctggccacagattgccacagccagcttgttggactgtgggggacaagtcttgggaccaagctgtccagactccctagctccagcaggggaaaagcacagcctttagctatagagatgtatgcagctcttcagccgcccagggagcttagcgtgttaggcagttgggagtcccagtactggctgctgtccctcacccaaggagctcaaacaggcttacacagcaggaaatcacagctgtggtgctggtcacccctctccccaggagttcagtaggcttaaacagattccagctgagaggctgttgagaatctgtgtgttccagggttgggacgctaggctccagtggtgtgggttcgtgagcgggatcttccgatccattggttacacagttccgtggaaaaagcatggtttccttgctttttcatacatttgtatgagtgttctattctttacaaatttttacttggcaataatttgtgctcattcatttattcaattcccaatgctcactcacttcctcccttggctagggggaggagggtcccctgccctgtgtggctctcaggtgggccactgcaccaccgtgttcttccttctctccgtgggtcatgccagccttctagtcagttctgatgagagaatctggttgccagtgaaggcctcacatgcttattatggttttattcgattggagcatctgaatgccactgttcctagtcggccttcttggccctgcctcctatgatatgtattatatacacaataagtagtcctcaatgtcatctttggcccttggaaactgagtttaagcaaaacggcatataaggaaactacataggctaattgacataaacaagagttaagctcctatggcatatttctagtcataaaaatatcaccaaacttataaatagaggccaaacacttctaaatattatacactgaactgtgaactatacatacatcaatacatatatttataaaatattaataaaaacaagaattatttactcaatttttggtgaatcagtgagtgactgtggtcatgacaatggtgggttaagtcatgaaataaatgtttgcaaagcaaaaattttgaggagcccctcctaccaccatgcagttcaaaaccaaacaataacatatcatgggctcactgagcactttgggattgcatcatttattgtcatgcatttgtatgagtgttctatactttacaaatttttatttggcaataatttgtgctcattcatttattcaattcccaatacactgatttcagttcagggtcttgggtagtcggagcctaacccagcagtgcagggtacaaagcagataccaatcctggatgggatattttatttcagggcacactctttcacacatctacactcactcagactgaaacaatttagacactcaattcacctaacctgcacagctctgggatatgagaggaaatcagccagaataccaggagaaaacccacacagacgtgggaagaacatgcagactccacatagacaatgatgttggctgggaatcaatttttttttcctcaacattgtcaggaaacaatgttattcaagggcctgctgtatatgtatatatacatatgtatatatcctatacatacatatgcatatatgtgcatacatatccatgtatataaatatatatatgaaatctaactatatcttaatctgtcatcattgatacttatcccttacacttcagctgaaaacaacaatctgtaggtcttgagcttgtcttgatgttttacaactccaaacttatctgcatgccactccccagcctggagtactgtaaggtatacttggcatattcccgtcaattttttgagacttggttcaagtgtcccatcctctgcaaaacccactcagccaaccttaatgatttcccccttttatttaggatactgtcactgcaatttttttttttgaacctgccactcaagtatacacataccccactcaatgccaaggattgtcttgaggcagaactgcctggaactcctgtatgtgcctccatgaaagcctacatgtaactatttatttgtcaatcttcccactaaattgggagcacttttattcctaaaccccgggactcagcacagtgcttgatatccaataaatactcattaatatctgttaaattaataaatgcactttaaaaagctgtgcattaaaaatgttaaatatcttaggatactatttccttagctagccacattacaggagaacagaaactccgaatttgaccttaaaactctaagatttacaagttggactagattttcccgagaaatagcatgagatacaaattggaatctaagtgctgagatcattttttctggctactttgcgaaatatcaggtaaggcatgttaatgattaattaagtctttcacagtcaaacaatagtaaaacttcaaaacctggagagaattcctaataaatctggcacatagtcttaatttccacagccaaagtttatgagtaccgtcaaaagagtttctagcattaatggactttgctgaaaagtttctagcttgccagctgctacaatgaatttgtcagtatttttgtgtgcttgtttttgttttgttttaatttttgagcaggacataatttttgagcagggtatagcaaggacagaaagctagaaattcagggaaagacgatctggtggcaccgtatgaaaaattattagagtctatacaacacttaaataatttctcatctctgatcttgaacttcctttgcacatgaaacaaagaacctggatttgtctgtctctcacattctctattgtaaactactctagaattttaggatgaagataacttcactgagtgagtttcttgaccccataatgttcaaacataattttgagagactaggtcaagatattcaactgtgaattcaagcatctggggaaaagatgagattaaatgattgttaaagtttcttctctccttcaaaaggggaatggagaggtatgagaatgggaacaaaatgacaacaactactttaccatactggtcagagtagcccttgggcatatcaacagaactgagattagttatttaggacttgagactacatggaaagtataatgtgatgatgatattcaattacttagtgtcataaagatcaagagctcctggataagaagacaagccttttagataagagcaggcttgatctcacgaacataaaagagacatcatctactttaaattagatttagaggcctgggccaaaaagacaaattaagtacaaagaattaagtagaacagagatgctgtggggaaaaaaagaaccaagtgtatatcaaagaaatgagtgacttttaatgcactgtagtctaagcattatttaccttcattgagatgaaggggaaaatgttgatggaaaaaaaattttcatcactgtaactgaatttaggttgaaagaagctcatatcttaatgcttaggtgcttaggtgagtctgtcggaacacacaaaaaagctgttgttttaggtgggatcccatagaaaaagcactcaggttagaattcttgttcaaaggaattattgagggagtgttcaagaggagcagggaagcagaaagcatcagaagcaaaaagagctaatcaagaatgtggtaacagctggagacctgcttccatttgatctcttggtgaaagactggaagacaaattgtgccccagagtgtgtcccaccttaaagaaagaggaatggtctctcaccagtgccagtcagttattgagcaagatctggaaagtgatgggttcaggacatgctacctcaaaatatagcaccttggcatttgagaaaatggcagaagcaaaaaggtcactctctgaccttctcctgtccctatcccttgaatcaggccttaagacctagaaaagacttttctgagcttcctctgaagcaggtcataagaccctcacttgagaggcaccctctcttgacctggagaaaaggagtgtctttatctctgaagacacaaggacacatagaagaatgccctcagtttactatagttagatgatacattttttgtccaataatactttcacaactatccacatcttcctcaaacttatacataggtttctgttactttgggtcttcatttctgaagactcctgtgtcacataaacttattaaatgattttgaatgcttttctcttgttaatctgccttttgttacaggagcttcaatcatgaaccaaaggatctgtgagaaaaaagaaatcctttctcccctacagggaagatgctgagtgtatcacggaggcagatccccagttgacaaaagtaattctccagagaaagggggagctaaaaattgtcatcagtcagcacttacaagagtcagggcttgcgtttgtacaagcactacaagagtcagggcttgtgtttaccaactggtaaagggcattttgctgaggccccaacagcatccacttctctgacaagcctttcccaagtaatcactatcttttcagtgtttctgtcctgccctatatatagttcagccttcttgttcacacaaacatttgtatctgtttagttatgtccctgccatcaactatgagccttacatgaggaaatttgctttttcaacttcaaattccagaatttaacacaagtgctatttttttggaaaataaaattattttctgatatattattttagaaatcccacatttctagaatgatgttcctttctaccccaaattttaagccattaaaaatgtgtatcctataacctctctgaacttgagtagatatttataatcatgtttcacattttatgttttcaactcttggccacagttcattgtgttaaaaagataataactgtaccccatggcaaatcattaagaaaaatacacaagcaatatatttttttacactccatctgtcattgagcacttggtaaagtagcaggactcagcaggactgtcacagactctgggtttccatgtgctctaatgtcaccccaaactccttcgcctactcactcaccatatggaatttatgccatattcttctgatattaccgaatgtgtaattgagatatttgccctgctgccaatattctaacatgaactcattctgaagtcaggtaggagctggtttttttctgtctggtgcctcataaaccacccacatcaaaactgaaccaactaattagggttgtaatttatgtatggccaactaaagagtttttaatggctcatatcatatttgccagctctaagaacaattcagtgggaaccagatggctcaaagtacaccccttttgttggctcaatctacctgatttctgcagctcacagtcaagattagttcctctttgtcctataattttttaaagattataattttattttatttctctataatttttcaacatgacaacatgaactacaaagtaggagtcaaatagacaatgtgattcttcttgtcaatctgttactacagagacttttttgaaaggaagataatcaagttctctttctgattatttgtttcagatttggtaatttagttaaaaattttcaaccatctgataaaaatagccagagaatatgaatatcaaacatatagaagaagaaatataaataactgataagtatataaaaatagataactagtcatttcagtagtcagagttgatagtcaattcgaacataatttattttcatgaaaatagaagcatgtattatatgctattgcgcaatatttctctagattactgaagagtctaccacaaaaaaagataattttgtcctccatgaattaacaatatcatacttattggcagcatattgttcatgttcattaaaatgaaatatttgatacaggaatgtctgtcattgttgttagtaatagctatcatttgttgaacctttcctatgtgacaaatactgtactttgtgcttctacaaacattaggtatgtaacgtctataaaaactttattgttttacatataagaaaattagggctcagtgattctgagatttttcatgaatgacataatttaaaatggtagagcttggaattaaactcagatctgtctgcttccaaagctcctactctttctaagggttaagacaaagctccctccctaatttaaatgaagggattgctatgtgttacatccatgtaattgagcctctgttgggatatggctctaaatgtatccagtttgctgagtcaagtgacccattgttctataggaaaataaaggcagggattaagaaagtggagaatggtagccaaaggcagggagtacgatgctctgagagagaggaaaatcagtcctcaactactgtcagctgagctagcctgtcactaagagctagattgtgatgttctcttgtggaacataacctcacaaaacccaatatgagacaaggtcattcattctgtgatcacagtgcagcaagacaaaacgataccactctataatgtttgaggcacagacaaaaacaggacaatgtccaagctacagcaatgatcaaacatctccttctcccagctaatatgagtgatggctgcttctttacccatggtttaatcttgctccattcctcagctatatagataaaaattaaggatcatataacttttcccactttgtggcagcacccagtgaagagcaaaactacactgtcttaaacactcccccatattacctaatgcaagcacaaatactgtaacaaattcctcctaacactctctttctgaaatacctaatagttccccaaggttttttttatctcccttggggcaatgagccaattaagtccaactttcttgactacagatatattgtttgtctttggtgggagggcactgaagagctccttctctaatgaagcgcttggattagataaagtatttatttgatacaactactctccttgatcggtgctcaagaaaggagttgataaacttttttttgtaaacgacaagatagttattatttttacctttgcaggccataggatctctattgcaactattcatctctgccattgtggcacaaaagcagcacagacaatatgtaaacaaatgagcaaagctggatttggtctgccaggtgattgtttagggattcccgggtttgattagcttgatggggccaactgttagaatcatactaattcatttttccttctgaatagcttctcttttaattgcctttattttcttaactggaatatgattactctgcagaaacttcttcccatatggttgccatataaaaatgtcctttggtatagctagaactcaaattacataactatagaataacctttacacatttgagtggttccttaagtttccccttgaaaatggatcactgcagtcattcaagtggaattacattttctaagccataattctgtaccatgtagtcttttaggcacagagggtagaaggatggttattttcttttaggagctcagagcatagctggagagtcagcatcgcagacaattaataatgaagaacaaattacaaaaggctgtaaatttgaaccaaaataaatctgcataatgcaataaagtgaagagcaataaaatgaagtatgcctgtcctaaagatcccagagagacatgatgagaaataaacataacgttcttcctttaaaatagcatatgttcccccatgaaagtccaaattctatccaaagaggcctgttctaaactaccgtctgtccaatatctggacctttctagttaggagttctacagtcttggtgccattttcttgttcccagctattctttgcacattggcaggtaagagtccactgctttctaaaacacctacaaagtacaaagtgaagacgcttgaggaaagaacaaagctatccagaattgtcttaagtttcaggcctcaaaccaaggcctacggtttttgttcgtttttctttttcttttcttttttgaattaagaatgcaattttctcttcttcagtgaaggaaagctagtgaatccaaatgaagtctggatgatgccaggcacaatcctgaaggcaggcattcggtttacttagatggcaaattcatctcttattttcaaggtgcagccaattgacatctgtcaattggctatagtcaaatatcagccgtctaagatcaactaaaaatttatttcacagcaaattacacacatgaggattccaaatagttttgtataaaatttacagtaaagagatgattgggtaaatctaaatcgcttggagttgagtttaaccagcacaactgacttgggaggtgtccagaggttagcagcctccagataggtagcttctattccctagtccttgtccaagttttatgtctgtgaaaggtcagttgcaaaagctatctcccatgaaaggcccccatattcttagtagagactggaacttctattcctaggtgtaaaaatttgcattcctgaattttatgttttgggctgtctgatatatgccatttaaaaagtcatcagttattcagaaaaccaacagattcattccaataaagtgatatgaagggaaagaagctatgtggctctcaaaaacaatgtatacaaacacaaatgttggtttaatgtctttttttaaatcaaattataattaacatgttgccaagtgttggactcatagcacagaatgactaagtatacaaaaatgcaatatgaagaataaaggccttatagataatatgactaaagttaatgtgaaaaaggaaagaaaacaggaaaataaatacctaaattttcagattaaattatgacagcatggatttcagttatctggattctgttccatagaccttagttggaagacatagtctaccttcattatatgtagattttatatttgcaaattcacctactcactcacatttatttgtaacccctaaaccaatagccacagtgctttggaggtcattcacagctattcagagtgcagtgagaagtttgagttgcccaatgtgtttgttccttgctaaggtcctacagggcaacactctgccttcttgtttcagctcttgtactgtaaacaagtgttctttttatggtatatttagttctatgaatttgcatttttgtgctctgtgttggtgactttgctgttttgaaaggcttccaaacatagggctgaagtgctgcctagcgttccaaaactcaaggaggatatgatgtgccttaaggcgaaaatagtatgtgaaagttgtaagattaaaaatagagtcattgtgtcaaaccctggcaaatgaagctgagtaaggtgatgaaggggaggctctaatgcacaatttgcctaataacagaaattatcacaagaaatgttttcaaactacagcttactgaagagtcagctaggactgctagtagcacaaggagagctagccacttatacaagaacacttgcctaatacactgtctcacaagcccaaccccatactgtaaggacctagccataactacaagattacctctcctacctaccaactgctgaaacccaccactcacaactcaccagctcttgcaataggtttccagggccaactaaatttctttcaaaataatttgcataagctgctctttcccccataaaaccctcaccttttccatcgttctccagacataccagaggccatcctggtctgtatctatgtcctggactgcaatcccatttcttgtatattattcacaaataaaatatttttacttagagattcacatctctatgttttgtatggtggcaagtacataagataagcttcattgaggcatgaattatagtgctattgatcatgatttcaatgtaagtaaatcaacaatatatattaaataaggtgtctttaagcagaaacacaaaaccaggcttgtattgatcagttaactaaaacatggccagaggcttgcagaaacatcacctcttatttccccaaggagcaatgatttgatgttcactaattcagtgttcatgacaaccttatgaacattaccatgaataacaagaatctgctgtttctacatctcttaatgctatctaccaggactcaaggtcttgggtgaaagcaatcagtcttcctccaaagactgattcttagtggaaagtctgacttgtgacttctgactcaaaggaaattaaatatctaagcacaatttcacttgcttaaaattcttcccattgccacaaaaacatggtcaacaacaatctttaatgctctttaaatctcaaagcactatcaactatttgagtaggatttttgctgtacttatttcacaggatttaaaaggattcaagccactgttaattgactatcaaaattccttctcctcaaaggtctattctgtcaacctctatttgttggccacactaattattaagaaaacccatcaaattcatgtggacatgctcctccataatgtgatataatctttgaagtaagcaacaacctttctttctgaaaactcatagagttatttgcctaaatattagacatgtatgcaattctatagttttagtatttataaatcctttatttgttgaattaaattaacaaatacatattaaattatgacaggcacaggcacaattgttaaactgagtgtatttttctactaggagatcataacctttaataagactttattctgctaaatgtaatgaaacctttttattcctaagcttccataatagttgtacagcacttggcattcttgaccattctcacctttaaatatatatctttaaaatataaatatattttaaataaatatacatctttaaatatatatttttatataaaaatatatattatatacatttaataatatataaatatgtattgctttcatcataaaaataatacatgctattatacaggaacacaaatagcctagaaatatagatgattaaataataaaattcccatttgctattttattgatgttccttaggaagtaaacatgggaaacagtttagggaataaatatattcatatattaatgagcaaatgcatttgtgtgtgtgtgcgttatgtgtgtgcacacatgcacacatatatatgcaaggggatgagtttagacttttcacaaatggaatctccctaaaaatgtatttatttgcttatttgatatttgacatattctcattttcttctaatttgtacttcaaaaactaccctattctttttacctcgcctttgtaataaataccccattgattgaatgtagcatgattcactggttgtttatatagccagttaggaccagatgcttaggataaaaatatagttcacagttcttatttttcaagcctatcacgagcacttgttgcccaatttgacagttagtattgcctctctcgcttgatgcttccccactgaaatgtctaagaatccaggcagtttacttaggggtctattttcctttgagatgccaggtggagggaaaccggagagtacaatcagccgcctattgccattgctttctgtctcttcaacatggtacttttgttgaaagctggtcctattgatgtgtgtccacctggtaatctgatacctgctcaggctgtaagtcttgatcccaagattgagctccaagtttgcattaacattcacaccctcagttgtttatctcaaagcagggccactgttatctgatgactgggtcatcatagggtatttagtctcagcaggggctgtactggaaccagcctttctttttgagcctccagtctaaacattggtgtcacaccccgatgatctcttgtcctgactctttttctcaaaaggtgtactcacattgggctggtgtgtcatttcctgctgtaattcacaacaatccaactccatcaaagaggctctaatatatctaaatcaaaagagcttgggttcagtggtgggcacagtagctgatacctgtaatcccagcactttgagagactgaggcgggcagggactggtgtggggcgggggtgggaatcgcttcaggtcaggagtttgagaccagcctggccaacatggcaaaaccctgcctctactaaaaatacaaaaattagctgtagctgggtgtggtggcgcccgcctgtcccagctactcaggaggctgaggcaggagaattgtttgaacccaggaggaggaggtagcagtgagctaagatggtgccactgcactccagcgtgggccacacagtgagattctgtctcaaaaaaaaaaaaaaaagagcaagagagagcttgggtttgaacttaaccagtgcatctgacttgggagatctatagcaattatagcaattagtagccttcaagtaggcacattcgaaaggaaatgattggggtggggggtggttctcaagatagctggggtcctcccatgaggtaacctgactctgtgcaaaggcactcagcttctttccatgggccagttctcaatatggagcagtatttacagataactttactaggccacaaagactcctgctgcagccttcctcaaaggtaaggagtacttgctttaatttgaataaccaagaagatcctcttgagtgtttagataagaggcaaagaaggcatattccaaaatgtctccattccaccttcccaggccaagaagcaaaaaacagtttctttctttttttttttttcgagactgagtctcgctctgttgcccaggctggagtacggaggcacgatcttggctaactgcaaccttcaactcccaggttcaagcgattctcctaccttagcctccctagtagctgggattataggtgcgcaacaccatatccggctaattttttgtatttttaatagagatggggtttcaccatgttggccaggctggtctccaactcctgacctcaagtgatctgcccaccttggcctcccaaagtgctgggattacaggtgtgagccaccacacctggccaagaaggcagtttcaatcactaagaacttgaatgttcacttctccaggtgtaaactacatttgtttactgacaagtaatttttttgtatattaatttaaaaagtagtatacttaatattcttattattttaaatagtttgtaattaattctcttcagttttgccagctgcaaataaaaacattgcttcctctttactactgttaacatttctttttcttatccagtaaaattaagacagttcttccacatcaaggttagaagtgatcatgaacatcattaccttgttcttaaatttaagaagaaagtttctagtgtttcatattaaacatgaggctggcactgtcttttttttttacaacatttattttaagttcaggggtacatgtgcaggatgtgcaggtttgttacataggtaaatgtgtgctgtggtggtttactgcacagatcatcccatcacctaagtattaagcccagcatccattagctattctttctgatgctctccctcccccagtaccccttttggcagtccccagtgtgtgttgttctcccccatgtgtccatgtgttctcataattcagctcctacttataagtaagaatatgtggtatttggttttctgttcctgcattagtttgctgaggataatggcttttcaatctacccatattcttgcaaagaatatgatcttattcttttttatgactgcataggattccatggtgtatatgtaccacatttgctttatccagtttatcatcgatggacatttatattgattccatgcctttgctattgtgcatagtgctgcaatgaacatatgcgtgcatgtatctttaaaacaaaatgatttatattcctttgggtatatacccagtaacgggattgctgggtcaaatgatatttctgcctctatgttttcttttgtttaattttgagtctcactctgtcacctaggctggagtgcagtggtgtgatcttggctcactgcaacctctgccatccaggttcaagcaatcctcccacctcagcttcctgaaaatctgggaccacaagcgtgcaccaccacagccagctaaatttgtatttttaatagagatgggatttcaccatgttggccaggctgttctcaaactcctgatgtgaagtgatccgccagcctcagcctcccaaagtgctgggattacaggcatgatccaccatgcccagcctgcctctaggtctttgaggaattgccacactgttttccacaatggttgaactaatttatattcccagcaacagtgcaaaagtgctcctttttctccataaccttgccagcatcggttgtcttttgactttttaattatagccattctaactggcgtgagatgatatctcattgtggttttgatttgcatttctctaatgatcagtggtgttgagcttttttcatgtttgttggctgcaaaaatgtcttcttttgagaagtgtccatgtcctttgcccactttttaataaggttgcttgttttttttcttgtacatttgcttaagttccttatacactggatattagaccttggtcagaaggatagattgcaaaaattttctcccattctgtaggttatctgttcactctctgttgatagtttctttgctgtgcagaagctctttaatttaattagatctcatctgtcaatttttgcttttgttgcaattgcttttgacggttttgtcatgaaacctttgcccgtgcctatgttctgaatggtattgcctagattttcttctagggtttttatagttttaggttttacatttaatgctttaatccaccttgagttaatttttgtataaggtgtaaggaaaggatccagtttcatttttttttgcatatgactagccagagactggcactgttttaaatgatgacaaggttttacttctctgttgtgcttttaattaaaagattgatgattatttatatcatcctcaccttcttataaagaaccttgattagttatgttgtattattcttttaatttacagctgaatcctgtgagttcatactttaattcaggattttgtaataaaaagattaataaattgagtttgataagtttttttatgctactcgtgtcaaatgtattatcttccaaaaaataaagaattttggtgtttcacattttattctttaatccatcctgagttaatttttgtataagatgtaaggaagggatccagtttcaatatttttgcttataaatagccagaaactggcactgttttaagtgatgacaaggttttacttctctgttgtgtttttttaaattaaaagattgatgattatttgtatcaccctcaccttcttataaagaaccttgattagctatgttgtattattcttttaatttatagctaagtcctgtgagttcatactttaattcaggattttttataaagattaatagatcaaatttgataagtattttttatgctacttgtgtcaaatgtattatcttccaaaaaataaagaattttggtgtttgtcttatttctccatgctcctgatctacaaatcacataagaataatgtgctttttaaagttatgaactaatgaaccagtaaaagatgtgagactaccatgtcatttttgttatttttttaattttagaagacagtttttcaataattttctcaggattttctatgcttcttgctccattttcttttactacttaaagtcaattttgatcatttataaatatatattttttaaataatattttctaggttttaaatgcatttgcataatgttgtaaggcttgttatctcgttttttttccaattttctcactctctgtaactgatttgttttcaattttgtgtgattttgcttactctcatttttcttgattagaattatgatgttgtaatttacttttaagatactttaacatagagagtgtgatattatctatgtgttattctaagctatacataaggcaaaaaacacttgttaagctaatcataaattaacaggccaggacgggtcatctagcattctgattaagaaaggtacatttcaggtatgactactataagtgctttaactattgacatatcagttccaaaagaagctttgggaattaatataattagtatcagaaatacttttttaccaataaaattaactttttattctgtataataaatgttatagtagactcctacatgctaagagaatgcagtaaacctgatgatctgtgtattctgagcccaaaacgtaaaaacactgtgtattagtgagagttctctagagggacagaactaataggatacacgtatgtatgaagggcagtttattagaattaactcacatgatcacaaggtgaagtctcatagtaagctgtcagcaagatgaggagccaggaagccagttcaagtccccaaaatcccaaaagtagggaagctgatagtgcagccatcagtctatggccaaaggcctgagacccccccgtcaaatcactggcataagtccgtgagtccaaaagctgaagaacatggagtctcatgttcaagggcagaaaacgtccagcaaaggagacagatggaggccagaagacttagccgtctagtctttccacgttcctctgcctgcatttatgctagtcacactggcagctgaatagatggtgcccaccgatactgaaggtgggtctgcctctcctagtccactgacttaaacgttaatctcctttggcaacactctaacagacacacctaggaaaatactttgcatccttcaatccaatcaagttgacactcaatattaaccatcacagactggtagcttttcctcccttcctcttaaaatccagcagccttgctataagaagcccaggccacatggaatgaccacatggaagaaaaatacattgccaattaatagtaccagttgaattcctagccaggagccagcaccaacttccagccagttgagtgaggtatcctgcgtgttctagctcagtcaagccccaggttaatgcagtcccaactgacatcacttggagcagaagaactacacagctgatcccagtcagcctaaagaattatgaaaaagataataaaatgactgttgttttaagacattacattttgggttggttttgtaagtatcagtaaatcatcagatcaaccatgtttacttgaacagggtataagaatttaaaaaggtatttaaggggcagagcaagatggcagaattgaatattccaccaatcatccccacgccccacaggaacaccaaattttaaaaactatcttcataaacacaaaaaaagcactttcacaggaaccaaaaatgaggggagcaattacagcacctggttttaacttagtattgctgaaagatgcactggagtggttaggaaagacagtcttgaatcgctggcatgatccctctcctggctttggctgcatggcatggaaacagaatttgtgcacttagggaaaagacagtatcacaatgagtgggggactttgcattgaattcagtcctaccttgtcacagcagaaagtagagtcatgctgaacttagccagtggccacctacagagggagcatttggacaggcccttactggaggggaagtgcccatctcagtggctgggaattgattttcagcaagcctagccaaggctggctaaagtgctctggagtactaagtgaactcgaaaggcagtggaggaaacaaagactgcaattcttaggcaagtcccgatggtgtccggggcttagagccagtggactggagcagcatatgacctagtgagataccagatggggtggctagtggtgtgcttctgccacccctccctcaatcccaggcatcgtagctcacagtaacaaaagtgactcattcctgctgcttgaaaagagaagagtaaagaggacttcatcttgcatcttggacatcacctcagccacagtaagatagagcaccaggcagagttgtgaggccccagtcccaggccttagctcctggacaacatttatagacacaccctgggtaagaagagaacccactgccttgaagggaagtacccagtcctggcacaattcatcacctgctgactaaagagaccttgggaactgaataaccaacagtgataatcaagtaatatgccatgggccttgggtgagactctgagatgtgctggcttcaggtaacagcttgaccacagtggaagagagtaccaagtacactcttggggtccctgattccaggactaggctcttggacaacatttcagtatctgctctgggtcagaggggagtccactgccctgaagggtgagtctcaggcctggtagcattcaccataagctgattgaagaattcttaggccttaagtaaacattggaggtggccttgcagaactttgtgtgagccagtggttttggccatggggagaggctcctctgcctgtggaataagtagggaagagtgggaaggactttttcttggggtttgagtaccagcttagctgccattgaataaaacatcaggtggatttctaaggcctttgattctaatccctggctccaagacagcttctctggacccacacagggcctgggagaacttgctaccatggaggaaaggacacaaatggctggcttccccacctgctgattgcagagccctggggccttgagcaagcataggtggtagccaggtagtggttacagatggccttgggtgagacctagtgctgtgctggcttcatgtctgacccagggcagttccagtgttggtggctacaggggtgcttgcatcatccgacccaaagttccaggtggctcagcacagaaagggagagagatggcgtttgtctgggagaatgtaaggaaagagaacaagaatgtcgacctgataatccagagagttttttcagatcttatgcaagaccactaagatagtacctttacaagtctgcaagaaccacagcattcctgggcttggggtccaagtcctttctaatacctcagaagccttcccaagaagaacagacaaagattgcaaagtccagatagtgaagactgcaataaatacctaactcttcaatgtctggacactgatgaatgtctacaagcatcaagaccagccaggaaaacgacctcaccaaattaactaaataaggcaactgagataaattatggagaaactgagatatatgacctttcagacaaaatcacctttactaaaagacaggaagaaaggaaagaagaaagagaagatcacaaaacagtaagaaaacaaataacaaaatggcaagagtaacctcttatttatcaataataacactgaatgtaaatggactaaactcttcaataaaaggacagagggtggctgaatgtataaaaaagcaagacacaatgacctgttgcataaaagaaacacacttcgtctataaacccacacatagacttaaagagacgagaaaagatattccatgccaatggaaaccaaaaaagagcagaactagctatacttatatcagacaaaatagatttcaagacaaaaactgtaagaagagacaaagaaggtcattatataaagggatcaattcagcaagagcatatgacaattataaatatatatgcaataaacactgaagcaaatatacaaagcaaatattaatattagacatagagagactgccctcaatacagtaatagctggagacctcaacactccacttttagcattcaacagatttttctgaacagaaaatcaacaaagaaacattggacttaaactacaatgtagaccaaacagacctaaaagaatttgaatttctgcagtatcacttgtaatatctatgttttcattctgattttatttgggtcttctctcattttttcttactctggctaaaaatttgtcaattttatttttttcaaaaaacaggttactcttgccattttgttatttgttttcttactgttttgtgatcttcttttttttctttcctttcttcctgtcttacttttagtaaaagtgattttgtctgaaaggtcatatgtctttgtttctgcagaatttgtctcacataaaagatatttacagaacatctcatctaacagctgcagaatacacattatttttagcatatggatcattctcaaggagagactatatgttaggtcacaaaacaagtcttaaaacatttaaaataattgaaaaaataatattatgcatcttctctgaccacaatggaatataaccagaaatcaataacaagatgtttgaaaacatacaaacacatggaaagtaaacaatatgttcccgaatgatcaaaggtcaaagaaaaaaaaggaactgaaaaattttttgaaacaaatcataatgaacacacaagcataccaaaacctatcagattcagcaaaagcaatactaagagagaaatttctagctataagtacctacatcatatatatgtgtgtctcaaataacctaactctgtatctcagagaactagtaaagcaagagcaaacaaaacccaaatttagtagaagaaaataaataataaagatcagagcagaaataaatgaaattaagatgaaaataatacaaaagataaatgaaacacagtgttggttttttgaaaaaaattaaattgacaaatttttagccagactaagaaaaaatgagagaagatccaaacaaataaaattggaatgaaaaggtagatattccaagtgatactgcagaaatttgaaagaatattagtggcaactatgagtaactacatgccaacaaattggaaaatctaaagaaaatggataaattcccagacacatacaacctacagggttaagccatgaagaaatccaaaacctgaatagaccaataacaagtaatgagattgaagccataataaatctcccaataaagaaaaagcagggactgaagacttcactgctgaattctaccaaacttttaaagaactaataccaatcctagtcaaactagtccaaaaaatagaggaggagggaatacctccaggcccattctatgaggccagtattaccctgagaccaaaaccagaaaaagatgcatccaaaaacagaaaaactacatgccaatatccccgatgaatattgatgaaaaaatcctcaacaaaataccagcaaaccaaatccaacaacacatttaaaatatcgtttatcatgaccaagtgggatttatcccagggattcaagaatagttcaacatattctaatcaaccaatatgatatattgtatcaacagaatgaatacaaaaccatatgattatttctattgatgctgtaataagcatttgatataattcaacatctcttcatgataaaaaccataaaaaaaactggttatggaaagaacatacctcaccataataaaaatgatatagtacagacctacagctagtatcatagtgaatgagggaaaactgaaagcctttcctttaatatctggaagaagacaaggatgtccactgtctccagtattattcaacatattactggaatccctagctaaagcaatccgacaacaaaaagaaataaagggcattcaaattggaatggaagaagtcaaattagacttattttcagatggtacgatcttgtatttggaaaaacctaaagactccaccaaaaatctgttagaattgataaacaaatttagcaaagttgcaggattcaaaatcaatatacaaaaatcagtagcggctgggcccagtggctcacgtctgtaatcccagcactttgggaggccgaggcaggcggatcatgaggtcagaagatcgagaccatcctagctaacacggtgaaaccctgtctctactaaaaacacaaaaaaattagccggacgtggtggtgggagcctgtagtcccagctactcgggaggctgaggcaggagaatggcataaacccgggaggcggagcttgcagtgagccgggaccgtgccactgcactccagcctgggcgacagagcgagactctgtctccaaaaaaaaaaaaaaaaatctgtagcatttctatatgccaagacagaacaatttgaaaataaataaaaaatgtgatcctacttacaatagccacaaataaagttaaatacctgagaacttaaccaagaagtgaaagacctctcagtgaaaactataagacactgatgaaagaaattgaagaggatacacaaaaaaaggaaagatatcgcactttgagaatggaagattggaagaatcaatattgttaaaacatccatactatccaaagcaatctacagattcaaaacaatacctatcaaaataccaatgatattcttcacagaaatagaaaaaacaatcctaaaattgatatgaaccgcaaaagacccagaatagccaaagttatcctgagcaaaagaacaaaactggaagaatcaaattacctgacttcaaattatactacagcgctataataaccaaaacagcatgatactcgcataaaaatagacacataaaccactggaacagaacagagaaaccagaaacaaatccatatacctacagtgaactaattttcaataaagatgccaaaaacatgtattgaggaaaagacagtcctttcaataaacagtgctggaaaaacaggctattcatatgcagaagaatgaaatttgacccctacctctcatcatatacaaaattaaatcaaaatggattaaaaacttaaatctaatgcttcaaactatgaagccccttcaagaaagcactggggaaactctccaagacattggtctgggcaaaatttcacttcttaacttgatcacatcaagttaagaagcttctgctcagcaaagggaacaatcaacaaagcaaagatacaacccacagaatgagaaaaattatttgcaaagtacccatctgacatgggattaataaccaggatatatgaggtgctcaaataactctataggaaaaaaaaaatccaatagtctgattttcaaacgtgtaaaagttctgaatagacattcctcaaaagaagacatatgaatggcagtcatataaaaacatgttcaacatcactgagcatcagtgaaatcaaaactacaatgatttatcatctcaccctagttagaatggcttttatccaaatgacaggcaataacaaatgttggtgaggttgtggagaaaatggaaccctcgtacattgttagtgggaatataaattagtacaatcactatggagaacagtttggaggttcctcaaaaaaccaaaaatagagctatcataaaatctagtaaccccactgctaggtatacacccaaaagaaaggaaatcagaatatcaaagagatgtgtactctcatgattattgcagcattattcacaatagttaagatttgaaaacaacctacgtatccatcaacaaaagaataaaaaaggaaaatgtgatagatatacacaatggagtactattcacccataaaaaatgagaatgaaaccctgtcattggcaacaatatggatggaactggaggtcattatgttaagtcgaataagccaggcaaagaaagacaaacttctcatgctctcacttacttgtgggagccaataattaaagcaattgaacacatcgagatcaagagtagaaggttagttaccacaagctaggaagggtagtgggggatctgggaagaagtggggattgttaatgggtacaaaaaaagacttacaaagaatgaataagacctagtatttgatagcacaacaggttggctatagtcaataataatttacttgtacattttgaaataactaaaagtctataattggattatttataatccaaaggataaatgcttgaggggatgaataccccattttctgtgatgtgatgtttacacattgcatgtctgtataaactcatctcatatgccccataaatatatacacctactatgtacccacaaaaatgaaaaattgcaagtatttaacatagtactggaaaccattgccagagcaattaagagagaaaaagaaataaaaggcatctaaattactaacaagaagtaaaattatctctatttgcagaagatataaccttatatgtagaaaactctacatattcttcaattaattaaccaataaaagtgtgtaaactaatgagagaatttagcagtttcaggatacaaattaaacacacaaaaatcagttgtgtttctatctactaacaatggccaattcaaaaaggatatcaagaaaataattccatttacaatatcatcaaaaataataaaatatttatgaataagtttcaccaaagatgcaaaggacttgtacactgaaaactaaaaaaaatgtggctgaaagcaactaaagagcacacaaataaatgaaaaaaaatcccatgtctgtggcttggaaaacttaatattaggatatcaatactacccaaagtgctctacagatttgatataattcctatccaaatctctgtcttttttttttcaggaattaagaaacctatcttaaaaattcatatggaatttcaagggaccttgaagagcccaaacaattttgaaaaaaaaaaaaaaacaaagttggaggtctcacacttcctgatttcaaaacttaaatatatggtaatcaaaacagttttgtagtggcataaagaatgacatatagaataacagaaaagaataaaaagcccagaaatataccctcatgtatatggttaaacgatttttgaaatgagttccaagaccattgaaaaggcaaccttttcaacaaatgatggaaaaactaaatgcaaaagaatgaacttaaatttctaccttacgccacttataaaattgtctcaaaattaatcaaagacctatagattcaatacaaatttttaataaagatgccaagaacatgtattgaggaaaagacagtcttttccatcaatggtgctggcaaaacaggctattcatatgcagaagaatgaaacttgacccctatctctcaccatatacaaaatcaaatcaaaatggattaaaaacttaaatcctaggctttaaattatgaagctccttcaagaaagcactggggaaaccctctaggacattggtctgggcaaaaactaaaactaaaaagtcttagaatgaaacaaataaatcttcatgacattggatttggcaacaatttctggatataacagcaaaagcacgggcaaccaaagaaaaaatagataaattggaataaattaaacttaaaaataatctgcacattaagacacaaccagagtaaaaaagcaacatggaatgggagaaaatatttggaaatcgtatgctgacaagggttggagacagcttaagactactgagttccccaggggaggtgtgactgtcatcactgcagctgcctgctgcctaagaccactgatgggcagcagccaccactgcagctccagcctgccatttttcccctgctggagctggggagactaggtggtttggactgggaggaatccccacagcgcagctcagcagctgtggcagatcttggcaagcctgcctgtttaggccagatcctgacccatatgtcctcaacaggcagggcctccctgcaggaatttcagcaactccagcgagggatttacaaacagaactctaatctccctgggatgaagcccaggatgggtaaccacggggtctccatgcatcagcgtacttagtctttcctcctgctggctctgaggaatccaggcagtccggatgaggggcaagcacggttcttcgttaagcagatccctgatcctgtgccttctgacagggtgagacctccctcagcaggggttgccaggcaccttactcaggagagttccagctggcattaggtcggtgctcctctgggacagagttaccagaggaaggaccagaaagccatctttgctgttctgcaccctccactggtgacacctccaggtgcaggagggacccaggcacatagggtctggagtggacccccagcaaaacacagtagccctatggaagaggggtctgactgttaaaataaaaataaacagaaagcaacaacaacaacaacatcaacaataaaagtccctacagaaaccccatccaaaggtcagcagccccaaagattgaagctagataaacccacagagaaagaatcaatgaaaaaattctgaaatctcaaagagccagagtgcctcttctcctccaaatgatcacaacacccctccagcaaaggcacagaactaggcggaggctgagacggatgaattgacagaagtaggcttcagaaagtggataataatgaacttcactgagctaaaggagcatgttctaacccgacgcaaagaagctaagaacttggctcatcccattcctgggtatgtacccaaaggaatataaatcattctaatataaagatacatgtatgcgtatgttcattgcagcactattcacaaaagcaaagatgtggaatcaacccaaatacccatcaatggtagactggataaagaaaatgtgatacatgtacactatggaatactatgcagccataaaaaggaaataggtcatgtcctttgcagggacatgtatggagcttgaagccattatcatcagcaaactaacacaggaacagaaaaccaaacactgcatattttcacttgtaagtgaaagctgaacaatgagaacacatggacacagaatggggaacaccacacactggggcctgtcagggcgaggtaagcaggggaaaggagagcatcaggataaatagctaatgcaagcaaggcttaatacctaggtcacaggttgataggtgcagcaaaccaccatggcacacatttacctatgtaataaacctgcacatcctgcacatgtatcctggatctttaaattacattacatgaaaaaaaataaaactaccactaccatatgattcagcaattcaatttccaaatacatacccaaaagaattgaaagcagagtgtcaaagatacatatgtagacccatatagaagtgttatttccaatagctaaaaggtggaagtaacccaaatgtccatagatgaatgataaacaaaatatggtatatacatatgatgatatattattcagcattaaaaaggaaagaaattctgagacatgctatgatatggatgaaccttgaaaacattatggtaagtgaagtaagccagtcgcaaaagggcaaatactgtatgcttccatgtatatgaggttcctagagtagacaaactcatagagccagaatggtggtttccagggcctgggataggggtgaatggggaattattgtttaatgggcatagagctttagttggggaaaatgaaaagtttctaaagatgaatggtggcgatggtacacaacaataaaaatgtacttaatgttactaaactgtacccttaaaagtatttaaagcggtgaattttatgtttttatttgctagatgaaaacatttctagagattggatgtacaacataaatgtgcttaacactactgaactgtaagataactgaaaaataattaagagttaattttatgttatgtgtatcttaccacaattaaaaataaaaacaaaaacttaagaaggaattagcctttagtcttaccaattatacttgaaatttgatgtctaattgtcctatgtccagctattgagttggaggatgtgtgaactaatgccaactatagttggcagcagaatctaaaagcaatagaaatatgtcagatctggctcaagcaaatggtttattctaggctgtgagcagagcagtaaaagaacaggaagtttaaactttatcaagagtaatgtggagtgacctaagtagctacaagagcccatccccttacagaaacactgaaaacagacccaaattgtaagaatcaactttgccagaatgctggaaaacagtaaaaggtttagagtaaataagcgaatgctgaatgaagaaaaaggcaacttaaaaatggcaggaaagctctgtggtgtttttacatgccattttcccacccctgccccagtgcagtagcagtcttgaagacagcagcctacattcccagtgtggaaccctggtccctgattctagaggaagcagcatagaccttattcagaaagaattatgtttggtataattagtctgggaactaccaggaagactagttcatggaatttggctttgtttggcctaacctagaactcacacaggttggaagagtagagggcacttttcaaaaacgtggtaacaataacaagcagcccatagacaagtggagcaaaagcttacagtgaaacatacaatacagtgttcaaaccctgggattaaaaattgaggagagagtttctttggaaattaaaacattcaaaagtgaccgtgtatcccacagaatttagaaagctacacatatacccatgccagatgcatattcagaaaacaacaacagtaacaactacaagtttttacctctggctgctctcaaggctcagtgcaagcagacagtgaaggggaaggtggaattgtgaatgacaggactaagaattaaaggagtgcccagtacagagccaatctgcaaagagtaggagggagttttatccttattttttccctttttttctcccttagttgcaatatctattcctggcattcaaggaaatctctggcgaaacactcgttgaacaaaacataaaggaacacaaatttcagagaccacacatgactaagaagacaaactttacaacattaattcagaaaattgctttaaaaacaaacaatataaagcacaaaacaaaaatcctgaagagtgggaagattctgatttccagttaacacattctaatactgaaaatgttcaattttccatggaaaattatgaagcatgaaaagaaataagaaaatatagtccattcacagaagaagttaatagaaactttctttgaggaagtataaacattggatttactacacaaagatttaactcagccatcttaaatatgctcaaggagctaaagggacccaggagaacaatgtatgaataaatagagaatatcaacaaagatatagaaattataaaaagaaaccagagtcattttttaaaaatattttccttttattatgttcagctgacatgtaacaattgtacatatttatggggtagaatgtgatattttgatacatgtatacaatgtgtaatgatcaaatcagggtaattagcatatacatcccctcacacatttataatttctttgtgttgggaacattaaaaattcactcttctgtttgaaaataaataataaattatgattaattatacttatcctgcagtgctatggaacactaaaacttatatctcctaactagctataattttacatctgttaacaaacttcttactatcacctccaccccgactcaatacctttcccagcccgtagaaaccactattctattctctacttctatgaaatcattgttttagcttctacatatgaacattcagtatccatctttctgtgcctgcttatttcacttatcctaatgtcctccaagttcatctatgttgctatgaatgacaagattttattcttctttctggctgaatattattccactgtgtacgtataccatattttctttatctgttcatctgttgatggacatgtaagcttgttccatatctcagctattgtgaatagtgtttcaataaacataagagcatgtgtttttgatgtattgattacttttcctttggatatatactcagtagtggagttgctggatcatgtgccaattctatttttagttttgtaaggaagcaccataatgttttccataatggccacactaatttacgtttccaccaacagtgtataagagttccctttcctctgtatccttgacagcatttgttattgtctttttgataatagccattttaactggggtgaggtgatgtctcattgtcattttgatgtgcgcttccctgatgattagtgatgttgagcatttttcatatacctgtttgccacttgtatgtcttcttttgacagatgtatatttagctaatttgcctatttttacattgaattattggtgtttttgttgttgagttatttgagtttcttgtgtattctagctattaatcccttatcagatgaatagcttgcaaatattttctcccattctctaggttgtctttttactgatcattttctttgctgtacgaagcttcttactttgacctaatctcatttgtctatttttgcttttgttgcctgtgcttttgcagtcttctcaataaacctttgcctagaccaatgttctgaagcatttcccttatgttttcttctagcagtttcacagtttggggtcttacatttaagtctaaaagatcgtgagttgacttttctatatggtgagagacaggggtctagtttcattgttctccatatcaatatttagtttttccagcataatttattatgtattcactgacataatgtatgtatacatattgtatattttcgtatattaaatcattctgcatccctgggagaaatttgactgatcatggcgaatgaatgacctttttaatgtactgctgaatttggtttactagaattttgttgaggatttttgcatctattttcatcagggatatttgtgtatagttttcttgtgtgtatgtgtctttgtccagttttggtatcagggtaatgttggcttcatagaatacatttggaagaatttcctcatctttaattttctggaggacttcaagaagacttggtattagttgttctttaagtgtttggaaaaattgagccatgatgccatcagatgttgggcttcctttgacaggagacttcttattattgaataaatttcattactcataattcatctattgaaattttctatttctttttggttcaatcttggtagtttggatgtatccaggaatctatttatttcctcttaagttttccaatttgttggcatatagttgttcataatagtctcttatgatccttcatatttctacggtatcggtcataatgccttcttttttatttctaattttctttgtttgggtcttttttatcttgtttagctattggtttctcaatttatcttttcaaaaagccaatttttattttttatcttttgtatatttcctagtcctaatttcatttgtttctgctctgatctttatatttttatcattattactaatttgaggtttacattgtttttgcatttctagttgctaattgtttctgatgtattgttcagcttttcatttgaaatatttctacttttttttttttttttttttgagacagagtctcactctgtcacccaggctggagtgcagtggcatgatcttggcttactgcaacattcgccttgtgggttcaaggaattctcctgccccagactccctagtagctgggactacaggcacactccaccatgcctggctaatttttatatttttagtagagatggggtttcactatattggtcaggctggtcttgaactcctcacctcgtgatctgcccacctcagcctcccaaagtgctgggattacaggcgtgagctaccgtgcccggctgaaatatttctacttttttgatataggtgtttcttgttataaacttccctcttaatactatttttgctgtactccataggtttttgtatgttgtgtgtctgttttcatttgtttcaattttttattaatatctttcttctttattgacccattggttattcaggagcatgttgtttaatttacatgtatttgtacagttttgaaagtccctcttattattgatttccagttttaatccatcaaggtcagaaaatatacttaatattattttaattatttttaagcttgctgagtcttattttatggtttaatgtacagtctatcctgaagaatgtttcaaggactgataaaaagaatgtgcattctgcagttgttggattaaatgttttataaacataggttcattttgtctaaagtgcagtttaagtccaatgtttcttttttaattctctgcctagataatttgttcaatgttgagggttgggtgtcaaagtccccaagtattactgtagtggagtctaccattccctttagatctaaacatttgctgtatatctctggatgctccagtgttgggtgcatacatatttacaattgttatattgctgaagagatccctttatcattatataatgatcttctttgcctccttttatagtttttgacttaaagtcgtttcatctgttgtagatataactactccaccttgctttagatttctacttatgtggaatgtctttttcaatctcttcactttcagtctatgcatgcctttacaggtaatttcttataagcaacatggttgggtattgtgttatgggttttttttttaatccatttagccagtctacatattttaattaaggaatttaattcatttacacttaaggttactattgaaagaacttaatcctctcattttgttaattgttgtcttattgttttgtatattttttcttcctttccccttctcttattatcattgtggtctggtgggtttttttgttttcttgttttgttttgttttgttttgttttgttttgtttgtagttgtaaggtccgattcctttcactttctgctttacgtatatgctttaccagtgaagtttgttgttgttgttttacttttatgtgtttttatgatggtggttatcttcctttcccttctagatgtagggctcccttgaatatttcttttaatgccaatttagtgatgattaatttcctcagcttttgcttatgtgggaagaactttatttccccttcactactgaattaaatctttgctagatatggtatttttggctgacaatatttttcctttcagtactttgaatatattatcccattctctcctgtcctataaggtttctgctgagaaatctgctgttattctactgaggattcccttatatgtgacttcatgtttttctcttgctgtttttagaatcttctctttgtctttaacttttggcaatttgactataatgtgcctcacagaggaccattttgtgctgaatctactcaggaacctttgagtttcctggatccagatgtccatctctctctccagatttggaatttttcagctgtcatgttgttaaatagattttctgtgccatttttgtctcttctccttctggaactcacataatgtaaaattttgtttgcttaatagtgttccataaattatgttagctttctttactctcatttttatttcttgttttttttttccctaatggggtaatttcaaatgacctatcttcaaagatttcttccctctgctgatatagtctgctgttgaaattctctatcctactttttatcttattcattgattttttttcacctgtagaattactgtttggtttttttataatatctatttttgttaaatttttcattcatattgcaaatcattttcctgatttcatggaattgtctatctatattctgttgtatatcaatgaactttcttaagatcattatttcaaactcattttctggcagttcacttattttcttttctatagggtctgttactagagagttattgtattcctctgctggtgtcatacttttttgcctttttatgtttcttgcgtccctctgtttattactgggaaggaggaaaatctttggtccatagtcatcttgggagaaagatttcagccaaacaaccattctgatagcagatttattgaaaatatggggagcagaaagcttatttaaaaggacagtatgctctgaaagatgaggcagagcaggctgctgaaagagaatgggccaatggccccctgagagttctctgttgagtttttacgatgttggatatttttcttgaagcttctgcttctgtctcaagtctctgccttttttctcttttttctgtatctagtttttccactttggccttaagtccccacattttccccacctggtttccaccccaggtttatgagattatcctcactgtcagttgatgtgcatgtacagacccagcgtgggatacgaattctacctaatggctgcattgctcattaccaccagcccaagaaggttgtatagtggtgaaatctatacttactgcacatgtgtatctcttaggaatttttcttttgccctctttcctccttatcagcatgcacctagcaacatcgtgacatttgaaatgcagagtgaataatcattaggcatcttaaggggcattcctttctgtataggtgttttgcctcctctctgctcatatctagtatgcatggtttgggtgatctctggggtgtgaagttttccagacctctcttttctcatggactccccactcctgcttgtgtctagctatctgcctgctctaacacgttaatgccagtgcatttggtgggacaattgcctcttccaaactttacagagtggcttttgaagaaaaagaccttcaactgcaggtgggtcttagtgtgttgattgggaagaatgtgatgactcttgttccaaatagatgtagtgatatagtcttcatgcagcttcttcaattgtgatcaatgtcagtgataactgtgagtgtctcagtgacctagactgtggaagtttgtggcagtggcagcagcagcagtggtggcagtggtgtagttggttaagtttctcagtgtcaagagcttttgaagttctcttatttttattttccccataatgaagagacttagcagagggaatcccccttattttcaaatatgacacaacttacaagcatctgcagtggcactggatttcaggtgcaaaagctcagagtggctgtggagccaagatcctaggtccagggtccaatgaagctttgtagcacctggatcgtggggtgcaggttaactctctgtagcagggttggatgtataatgtctgtggatctaggatctgtgactctgaggcatcccctttttagcagcttaggaccagaaggctgggttgtagctgtgattctgaccatagtgggtaaggcacaacattgacccagatctggagaaggagtgctctggaggtttgggcctgcggagcaggttatggctgcaattcaagagccagatccagtttggttcagaggcaacttgggtcccaagacatgaggcactgtgtagtgatgactctagaccctggaatagtaggacttggcaatccagactctgtgagaccaggtgcaatagcagcaaggaccccagaatggcagagcacagctattgtttgggtcctgggagacaggtagcagcacagtaattatttcacttcccagagagaagtgtgtctcagcatcttagatacagagggctaatcctgtccaggtaagcaaggaacttacttgtttggcatgcagtgaaggtgtctcagctatagtgtgggacgcacagctgctcaccttggctaaggcgctgatttcttaggaggcaatgcactgtttctgctctaacctgggggactgacagctcttggcagtccagggatcattactctgagatgcaggatgccacttcaacttaagtattggggtgcttgtctgctctgaatggccaaggcaccctttcctgagaggcagggtgctgctttaacttatgcaccagggaagcattactcttgcaggcagccaaggtactattttcccaggagacaggggactgcttcagcccaggcactgggaatataactgctctggcagtcaatgcatcatttccctgggatgccagttattgctttagctctggcatagtggggaaggctgtaggagtgactggaagatgtatgtggagctgctccattaaagcaccattttcctgggaggcgatgtccaatttcaggttgagtcctgtggagcaggtcacagcagtgactggcagggttttttggaactgctctactaaggtactgcttccatgagaggcagtgtgtgaggcttcaattcaggaccctagggggagggcacagcagtgagtgggaatggtagatggggcagctctgccagtgcaccatttccccatgagaaagtgggcagctttagctcaggtcccaagaggcagggtgcaggagtgactgaaagaggtagatggagcagcactgagaaagcactgtttcctcagaaaggaattctcagttttagctccagtccccaggtgcaaggcttagaagcaactgggaggagtaggtggagcaactccatcagctgctcacagttcagtttggggatgctggaccactgttggggagaggtggttccatggcagcttagccttagggataaaagggtgttgtggctattccatttcacagagccaagacacacttcagcagtatttccagtttcaagataacatagtgtaatagctagatgggggacagggagtgggcacagtgtcagctctttctctggagagagcacagctgtgtggactctaggaagctccctcagttgggtttagtgcccatgaggactgcagggttccccagtcttgaaaactgtaagtgtccaaggtggtggatgaaggatgctggggtcctcttgcttacctcttccctgctgctgatcctgactggaggatagggtaggtggtggcatccaggtgtttcctttcattgtttatgaggctatcctgagtttctgtgctcactagtgcttctgtcactttttgtatatactctggcactctcctttagttattttcaccacaatgtggttctttttttatttttattttttcaaaattttggctatctttatggaggaggacaagtgttaggggattctagttggccatcttgctcccatatagaaattatgaagatgaaaaatataatagctgaaatttcaaaactctctagaaggcttcaaaaatatattcagcaggcaggaaagaaagtatgaaaacttgaagataagtcaattgaaattgtccggactaaaaagcagaaagagtatgacgaaaaataaacagagcctaaaagacttatgggatattgtcaagctaaagtatgcttattagggatctcaaagggagagaaaaaagaaaaagaggtagaaaaaatatttgaagaaacaatggctgaaaatttcccgaatttaataaaatacttaaatcttcacattcaagactctcaattaactccaagaaggagaaatacaaagagattgattataaccaaattgtcaaaagtcagggacaaaaacaaaatattaaaagcaacaggaaacatggctcaacttatacaaggtatcatcagtaaaattaatagcagatttcttgatttctcttcagaaatcatggtgaccagaagataatgagatgacattttaaaaatgctgaccaaaaaaaaaaaaaaaaattaaaaaaaatccacccaagaatctatagttagaaaaattattcctaaagaatgaaggagaaattaaaacattcttgaataaacaaaagctgagagacttcatcactaatgggcctgccctacaagaaatgctacaagagagcacaatgagaacacatggacacaggaaggggaacatcacactctggggactgttgtggggtggggggaggggggagggatagcattaggagatatacctaatgctaaatgacgagttaatgggtgcagcacaccagcatggcacatgtatacatatgtaactaacctgcacattgtgcacatgtaccctaaaacttaaagtataacaataatttaaaaaaccctataaaaaaataaaaaaaataaaaaacatgattgacagacagaaatgaaagaacactacaaattagctcaaaggaatacaaagtaataaagagcaaaggtagcttcataggtaaatataaaagccagcattattgtattttggtttgtaatttctctttgtatttcctactttaattaaaagacaaatgcataatataattattataagtgtatgttaatatatacagagtaagtaaagacataattgacaataacaatataaaggggtgatgaggctatatattatagtagcagaatttttatatgctacttaggttgtcatcaattcaaaatagattgttatatatttagtgtattaaaagtaattcttatggcaactactaagaaaatatttgttaaaaatacataaaagaaaataagagtgaatcaaattggtacaccacaaacagctaattaaacgcaaaaggcagtaatgaagaaaattaaaaataaaagtatgacatattaaaaacagatgtcaaaatggcagatgagtgtgaatcaaattggtaaaccacaaagagttaaacacaaacgaaggcaataaagaagaaaattaagaacaataaaagtatgacatactaaaaatatatgtcaaaatggcagaagtaagtgcttccttgtcagtaactgctttaaatgtaaatggaataaactctacaatcaaaagtgagggattagcagaacagatttttaaaaccacaatccaactatgtgctgtctacaagagactcattttagattcaatgacacatgtagattgaaagtgacaggatgaaaaaatgtagcccatgcaaatataacaaaaagagagtttgagtggctatactaatgtcagacaaaacagactttcagttaaaaactgctgcaaggaacaaagatattatgtattgataaaggggtctatacatcaagataatgtaacaattataaacataagcaccaaacaacatagaaagagccccaaaatacagaaagcaaacattgacagaattaaagggaaaaatagttgtatattaatagttagagactttttaaaataatgaatacctacacgaagatcaataaaaaatagaggacttgaacaacactgtcaaccaaccagaccaaatagacatatataaatcactccattcaacaatagcagaatacacattcttcttaaatgcacacgaaacttcatcacctttagactctaaaatgttgggaaagttctgtgccagcttttttaaaaaatgactttttaataaatgttgatattcatgacaaattttggtctgagatttgtcattgataactgataatgaggctttagaagccaatttttatctgtcacatgtaactattttgggagctacctttatgtatcaaaaaggactaaattgtgttaggttactttaaaaaaggatagaaagtagtttacctctctctggaaagaactagcttttagatagagttcttagttgtacttttttctgtttatcttattaacatttaaaaatttttatctcctctacctatttttcttaagtctcttaaatatttgttcaactttgatttatttgaattaattatttttacatttttttatttagtaacaaatgtctaatgaatttttagtacaattttaataatagcatgtagattgcatgatgttgatgcttttatgacttttatgttttagagaatggtaattcctatctcttaagatttaaccattttgtctaccttccatttctaactgattgttttgtgttgctttcctaatctgactagcaattttttgtttcagtgtacttagctcagagcatatggcctgtaccccattacaaattatgaaaattattatgcttttcaaggtatgtatgtgcacctatctcctaaaaagaacaattcacatatgtatgtatacgtatttataaagaaatatatatatgtatatcttccaaaaaagaaatatgtgtgtgtatatgtgtttgctctgtgggttgattaaattgaagggatattctgtcagcaagtcagagtctgaaatatagaggtataagaccaacttattaatcatccttatccttactcattgtgtgtgtttatctgtcaccaaatgagagatatgtgaatgtctatttgtctacctattttaattttaatatattatgatagcacattagtagtatacaaagactcatggcacttatacattccttgtaggttagatcatttttcaacttttttaaagcatcctggtttgtctcctttaaagctttaccttgtgttcacagcattgtctgatactaacattgcaatccttgattacctttgaacacatttggcttttatctttctattgtcaattgttgtaaatatggggcagttcacactcatctttgtcaccatgacccttcattctctacactatgacaaagacatataggtacatctggctttagtggctatttcagctactcagcagtaaacaaatggatttatagtctcagaggagaaaaggaaaaacaaatgctaagtattgtggttgccactgttctgagaaaaacacaaaaataaaacctctcaacgtagtgtcctctcaccaatgtttctcaactcctagtcttactctcctctttataagtgagttctgacttttccaggcttacgttccatcttaggctttcacactaattatctccactctaccgagaaatgtcatgctctatctccttaaatttttctctttcccaggccatcttacccccgttatcattttacatgccatccagatgtttatggtccccaaatgtatatttccacactcaaattgtcatcttagctatagactcacacatgtgaattctttattttccagcacccacatctgctcctttctctgactttcctatcttggtctactacatacttggtcatgctcacaatgcaagattcactgatgtcctcttcttctccatcactctttacctctgcttattcgcgaaatctaatagaggctaacttctaaaaagtttgaaccccaatcatctctcttcttctctgctgccattgcccttttgataattattttttctcaagcagttaaaaggatcttttaaaatgcaaatctttttatgtctcattccctacttaaaactattctgtggctttcagccttgtatactgttggtggaaatgtaaagtggtacacccaatatggaaaacaatattaaaacattaaaattacaattaaaaatataattaaaattaaaatttaaaatacaattaaaatttaaaaattaaaaatacaattaccatatgatccagcaatcccacttttaaaggaaataaaatcagtatcttcaagacatatgtgtacctccatgttcactgcagcgttattcacaaaagccaagataaggaaacaatctgtctgttggtaggtgaatggacaaagagtctgtggtacatatatatatacaatggaatattactcatcattaaaaagaagaaaattgtgccatttgtgaaaacataaatgaacaaggaggatattatgctaagtgaaataagccagacataaaaagacaaatgctgtttgatctcccttatttgtggaatttaaaataatcaaactaataaaagtagagagtagaatgataggttccaggggctaggggctgggagaaatagggagatttggtcaaagggtacaaagttccagttatgagacggacaagttctgtgtatccaatgtacagcataggtaatgatggatgtgttaattaatgtactgtgatcattgttacacaatgtatacatatatcaaatcagcacattgtacaacatggacaggtttttccctaatttatttatctatgtctttaatttaaaaatatttaattggcagataaagaaaaaatgataaataaataaattgttctatggttttgtataaaataacatggctccctggttcctgctaactcctctagctttgtctcgtacagtctaacttcctttattttatgcagttgtactggacatctctgcatatccagaataagagaaggtctctcctgcctcagagaatatgcaagaaatgttctctttctttctttttagcctctcgcccatcattccttcgagcttcagtaaaaattttcaagggagtctttatagaccaaatttgatctttgtgaacatgtgtctcagatggcactcatcatatctgtaacagttcattttgtgtctttctctttaagcttcattaaggtttggattaatcctgtctgggacatctttattcccccagaacctctcatactttctgggatgtaatgggtgcttcatacgtagctatcaacaagagattgacgtgaaggtaacttagataattggtacacacatttcatttatttactctgtgttttattatttctcttttaattttaaaattgatgaaagggttatttattccaacagacacagaacttatttatgttataaaaataatctctattctaaattagagaattactacagatgtctactactatgattacaagttcttttattcttgaatccttcttttctatgaaacaatctgatggattgctggaatgttaccaagtaattccatcatgttggctaatcatttctgataatttcaaacatggacatgttctggttgacatgttttgggtcttataggagatcatgacagttgatccttggcagttatataaaatgaatcaaacttatattcaaataaacactgtagtgacaaatagctttttcaaagagatagagttacactttaagctattataatgagtatagaaattaaataataatatttccacacagttttttctaaaagtaaaaaagaagttaacaaatttaaatgatgtataaaaccagaaaactctgctgaaggaaaaaatcgttattaagtgaaggaaatgtgagatgagcttatttataaatatgtcaaaaataactttcaacatatgctaaaaaaacctcatttctttgcaactacttgggctggttttctactgtggtttgacactttcccctgaagctttctctttgttgaatataaagagattgaagtagaattaaatactttttaaagtattctttaaaatatgtaagtagtatatgaagtttttgttactggctatgtctgtgtcaatttaaaggcttaatactcttcaataatttctaagcttccaataattctaaaaaagtaaatggagaatatccatacaaaacagcattgccaaaccccagtgctcatctcagctagaaatggcatgcaaagtcattaaataataacaaataagcttatttttaaagtataagcagtttaatatttgttaggtttgggagttctaagatactacgttttcatcctcacctagtcaaaaatcttttactaattatagaagttgctttcaaagggtgattcttcaaagtactacaattgtacagatgtgcctcagcagttggcacaagcaacaagggagaaatgaaattacccaccttcataggggtagttggacatactaatatgatgtctagagaaaagttatgagttggatatataattttgggggttatgcccaagtagacaatatttgaaagccaagaaatccagtgaaatcaccaagtgatgagtgtggatagaaaaaaaaaagagagagagagaaagaagagatccaaggattagtcccgggtaatatgatacttaaaggctgagggaattaagtaaaatcagtaagggaaactagaaaggaatggccacagggcctacataagtggaggatttagattttgttaggaacatgggacattcatctacagaaccaggagaaaaggcagaggatgtgctgtaggtaagtgaatcaaggtggtggtagaattatggaatttctcttctgactgcttctattttcttgttgaactatgaaacaaaggtcattagctgagagtgagaatgcagggaaatgttttggggtatttgaggagaaaagagaaagaatgaaagagtcatctaggaaagcgggaatctgaattaaccgaggaaatgtcctgtgatttctaggcagcattaagggcccatatgagatctgtaatcacgaatttcaaagagaccagttagagtggttgtgtcctttctccagctaggttcaatcgtacctgtgcaggggcagaatagatggagagttggagttaatcaggctttgcaagaatatgataaacagagagaatgtatgcaaaggagtcattacaatgtttgagtaagaagatgcagtatcatgggaggtagaaagacagtgaaaaaacatataattaatgaattctaagtacaagtgagattctgaaaaagctttagagatggggtactaaagggagtaaactagaaagatagtgggtgatatttgaagagtggaatgtttaaattgagacaaagaagggatcactatcattggtactgcccaggctagcaaatgaccataagaatgaatgattcatgtatggtgtaaaggaagattactgggaagaggaagtctatgaactaagaagtgaggatcaagaaatgttgctgtcgtgggcatgaaaacgatcagaacatgattgtgggagttagtgggatagcatgaaagataagctcactggtgaagagaagatgcagaaacagagattagctacataaatattaaaatggccaagatcataacaggaatatggaggagagagagttaagaacttcaaagatggagtggaagtgactcaaaaatcagtttgaaaacttgagactttaaagttgggtatttttagaaagaagagttgtagaagcagtaatgaggaatatgaaaaacacttattccatctccaggtttggagcatgaggctggaggaggagaaaagcattagcgagtgcctcaggaaaacactgttctgagaaagacaggtgatgtttgagtgaagaggtaagggaaacactcataagctacagacataagattaaagagaaagatcaacatcacagaatatgtggtcccaaatgggcccaagaacttaagggaattgagtggggtatatgtgggagaaagatggatatttcaatatatgagagggctacttagttatttgaaaaaataaaattctgtgtcttcatttttttctgactcccttgtgagtcaataatttaaatgtaaaaataattttaaagtcctagaagacacttttaaggtaatataaaaatgttcaagaatgaagtaatttttggctgggtgtggtggctcacacctgtaatcccaacactttgggagaccaaggtgaaaggatagcttgaacccaggagttcaagaccagacttgacaacacagggagacctcgactttacaaaaaaattaaatgaagtctttttaagcatgcaaggaaatattcaaacattaaagagaaaactgaatttttatgctataaaaaaagaaaattcgtccaggtatggtggctcatgcctgtaatctcagcactttaggaggccgaggcaggtgtatcacctgaggtcaggagttcgagaccagcctgacaaaaatggtgaaactctgtctctactaaaaatataaaaaattagctgggcatggtggcaggtgcctataatcccagctacttgggaggctgaggcaggagaatcccttgaaccagagaggcagacgttgcagtgagctgaggtgccattgcactccagcagcctgggtaacaagagcgaaactccatctcaaaaaacaaacaaacaaacaaacaaccaaacaaacaaacaaaaaaatacccagaaaattcttgaacacacaaaaaagcttgaaagataataaattaaaaaatatttgaaatacctactgcagacaaaagactaattctgttagcatatgaaaatcacatactaatcagtaaaaagatgagtaaattgataaaaaaaattaatgaatgttaaaaacaggtcacagaaaaagaagtattttaaaaacgtgaaagatttattcattcttaacaccagggtattaaaaaaagaattataaaactcaaaaaatcttaaaacactcactcaaaattgaaaataaaaaaaatgcaaaatagactggctgggccgtggctcacgcctgtaatcccagcactttgggaggctgaggcaggtggatcacgaggtcaggagatggagaccatcctggctaacacggtgaaacctcatctctactaaaaatacaaaaattagccaggcatggtggcatgcacctgtagtcccagttacttgggaggctgaggcaggagaatggtgtgaactcagaaggcggagcttgcagtgagtggagatcatgccgctgcactccagcctggggacagagtgagactccatctcaaaaaaaaataaaaataaaaataaagcaaaataaatgaaatactactttatcgatcagaatggcaaaaatgaaaacaccgaccgtagtgatagttagatgggatgattattttaaattatccatgtgtgcccattttaatcacaagagtctgtataaaaggcaggcaggagatcagagaggtgagaacatgctaagatgctggctttgaaattggaggaaggggctgtgagcctaggaatgtaggtggcctccagaatatgaagaaggtaaggacatagattctctcccaaagctttcatgagtatcacagccctgtcaacaccttgatattaaaattctgatctccataaatgtaaagtaatacatttgtgttacttaagccattaagtgtaaggtactgtgttatagcagcaacagcaaactaatacagtgtggctggagatttggggtaaaagagataggtgaaactgtattaaataggagataacaggaaagatgattggcaagctagatcatattcagccattcatgataaggactttgcacttaatgctcataatctgggagccattgaagagttttaagaaaagatgtgtctttgttaatggagagattgtaaatcactctggctgcttgtggaaaatatgtaataggttgaagaggaaataaattagaggagtaaggaaggtattgcaatagcttaggaaaaatatgaggactgtttcttccaaggtgattaccatgaaggtgctgaatagtaatcggatttggatattgtgcctgatatattccattgactctccagatgcatctccatccgtctccctttaaaggctgacttgtgtggactgtgtctactcattccatgctggtatcaggttgacagaagagagctactcattcccgattccctccagaggacttgctctggatttgcctcatccatccccacaggttcctccaaagcagccccctccctaggactctctccttccagtctgtggtaactgctcctcccctggccccttcagtccttgggttgttattcccctcagggtactacactagctctgtgtttcccaaataccctgcccagacctttattaaaaaagcttttttattaaacactccctcaaattattctaaaatgaatgtgctgtctgcttcctgctaggaccacaagtgacaaacacattaagcagatagagccagaggacctggtgatggatttgtgtggagtgtgagagaaaaagaagtcaaacaaatatcttacctatctgctattttataatatctttattatcctaaggatatatgcctaccatcatactatacaactatcaaattatttgatgtgacaatcaaaatgatatttattcatctatataaattgtatccaagatgcgatcattagaatttcacatactagcaaagaaatcagtgatcaaagctgacagacaggaagctgaaaaagcaggacttccaaaacataaaagtatcaatgagataatatttttgtgaatattagcctacctagtctgaataattaatgaatgtaaattcagctctccaaaagttattattatacttgtactataaataacgcttgcaaaggatggaattaaactaaatacaaaactgctaataaataaaaggatgatcaggttaagcataagcagagtgaaaatttaaactgaaaaatctttaggagaatgtgatctgagctaatttttggagaatgagaacagtgtaatgtggtagaaatgaaaggaaacaagagtctttatgaatataaaaagtaatagtcatttctagaaggctccgtaaaactcaaaagtaaaaccatataatggtaaagggaggaaatatatgaacatatattgtatgatgtatgttcaggaggcctgagtcctttttcctttctaactagaattctgtaacttttcaaatttattactaatctctgaaaactttcagtgcttctcattcttcattttaaaaatgaacgtaagaatgactatactatttaattcaaagctgttttgaggattagatgatagactgcatttaaagtagtgaaaaagttgaaacaatttgcaaatgtgtctcatatatatatatcttatatatatatatcttcctcttcttatatagccacagtcttctcagatactcagggccccacttttatgacctcactttaccttaattacttcctaaagatcctgtttcaaatacagttacattgggaattagggctttaatgtatgaatttgggggagggggaaatacaatttagtccatgggagtgaagtatttagcaggtgacgcccaggacacatgcgtgggaactggatgcaaaggaaactggggagactggaaaagttctatttgactggaaattccccaaatatagtaatggtactccaagaaggctggatatagagagaatataacaagttcccactgtatctagtaaattgaattcaagaaaatcagacatggagccatcattttaatcaaacaaagctctttattggcaaaatgtaaccatacaacctacagaattgctgcttaaatgatgtagaaatgagatctagacaaaatttagacattggagatgtttagttctaataaacaagagattagcattggagagcacagaaagaaagccagaggaagagaggaagggagaaaggggaagaggggacattactcttggtttagtgggaaacgtagatgaattttctacctcataagaaaagtttttgccaacaagttttaaaagaattttgtaaacagtgttaattagcatgatgtaatggtttcttttatattcaatataaatctttattcaacttatttgaataacttgaccttctctactgccagatactcaaattaagtctgctgtactttaatcagatattaaaatatgtaatatatactttaaatgggttctgttttatccaaaatagggtgcaaagcatacaattttgattcatccattctcaaagttccccaaagataaattaatcagtaaaatgaagaaaattctaacttgctactggaaactagagaaagagtattttaatgtatctgataattgaaaagtttcagcaggaagtaatttatgccagagcaactaactggttgccatccgtggaatgtgccaatagatgctgcctgaagaaataaaggagaggccaacagtgcccaccagggaatcataccttagctatctgactagacgatgctgtgaaccactcgttcctgagaatgagtgaatgtcaaatcaccaggcatatgaaatatcccaggaatttaagtatagatcattctaaatctctagtgcaagagcattctgtaaaacagaggtcgtcagggacactgacatgcccactacacttcatgcttccggcgccataggcagttggcaaatgttagcctatcacctgcctgacaaacaacccagattgtgtggtttacctaatttttctttggcgcatttcagacaatatgaaatcaaaacatgttgggtttttttcagcattcccagacacaaaacaaaactatcctaatgtagttaaggccacttttaacctttctattttagatcacagcaggaaataaaataataacagagcttttctatgctttttggcataaggaaatcatgaaaccatttcatttttatcaattatattggttacctctaataactttttttcttttgttctaatctgccttttctagtcactattctttcagtctttgataaagaagctgcccagctcttaggagtattttatctgagagcaaataaaaacatttgcctactaaaagtgaatgattgtgaaggactaccttttgggtgggctgaggttgtagctgagaagtcactttgcattctttggggcctgaccttctctactgccagatactcaaattaagtctgctgtactttaatatagatgaggatatgaccatcatgaaaaaatacaaactcaccagagccaaaaaaaaataatctaagtcccaagtcttaccctggtgattttttatgagtttttaccttggagtgctcttggactcaactatgtctacctaacagcaagcacctgatccaaaactaaaaaactggtgtattagtctgtttttacgctgctgacaaagacataactgagactgggaaatttacaaaagaaaaaggtttattggactaacagttccatatgcctgaggaagcctcacaatcatggatgaaggcaaggaggagcaagtcacatcttacgtggatggcagcaggcaaaaagagagcttgtgcagagaaactcctgtttttaaaaccatcagatctcgtgagacccattcactatcacaagaatagcacagaaagacccgcccccatgattcaattacctccccccaggtccctcccacaaaacaaaattgtgggagctacaagatgagatttgggtggggacacagccaaaccatatcattcccccggcccctcccaaatctcatgttctcacatttcaaaaccaatcatgcctgcccaacggtcccccaaagttttaactcatttcagcattaactcaaaagtctacagtctgaagttcaaagtctcatccaagacaaggcaagtcccttatgcctatgagcctgtaaaatcaaaagcaagttaattacttcctagatacaatggggatataggcattgggtaaatacaggcattccaaataggagaaattggaaacaacaaaggggctatgggccccatgcaagtctgaaatccagtagggcagtcaaatcttaaagctccaaaatgatctcctttgactccatatctcacatccaggtcacactgatacaagaggtgctcccacggctttgagcagctctgcccatgcggctttgcagggtacagcttccttcctggctgccttaatgggctgttgttgagtgtctgtggcttttccaggcacatggtgcaagctgtctatggatctaccattctggggtctggaggacagtagccctcttctcactgctccattatgcagtgccccagtagggactctgtgtgggggcttcaactccatatttcccttctgcactaccctagcagaggtgctccacaagggccctgcccctgcagcaaacttctgcccgggcatccaaacgtttccatacttctgaaatctaggcagacattcccaaaccctaattcttgacttctgtgcactcacgggctcaacaccacataaaagctgccaaggctttgggcttgtaccatctgaagctatggcctgagctttacattggcccatttcagccctggctggagtgactgggatgcagggcaccaagtgcctaagctgtacataacatggggacactgggcctggcccatgaaaccattttttcctcctaggcttccgggtctgtgatgggagggactgccacctctgacatgccctggatacattttccccattgtcttggtgattaacattcaactcctcattacttatgcaaatttctgcagctggcttgaatttctcataaaatgggattttcttttctatcatattgtcaagcggcaaattttctgaacttttatactctacttcccttataaaaccgaatgcctttaacagcacccaaatcacctcttaaatgctttgctgcttagaaatttcttcttcaggccaggcacggttgctcacacctgtaatctcagcactttgggaggccgaggcaggtggatcacgaggtcagaagttcaagaccagcctgaccaacttggtgaaaccctgtttctcataaaaacacaaaaattagctgggcgtggtggcgggcacctgtaatcccagctgcttgggaggctgaggcaggagaatcacttgaacctgggaggtggagtttgtagtgagccgagatagcaccattgtactccagcctggctgacagagtgagactctatctcaaaaaaaaaaaaagaaatttcttcttccagataccctaaatcatctctctcacattcaaagttccacaaatctctagggcaggggcaaaacgccaccagtttctttgctaaaacataacaaaagccacatttgctccagttcccaacaaattcctcaactccatctgagaccacctcagcctggaccttattgtccacatcactatcaggcttttggtcaaagccattcaacaagtttctagaaagttccaaacttttccacatttttctatcctcttctgagccctccaaactgttccaacctctgcctgttaccccgttccaaagttgcttctacatttttgggtatcttttcagcaacactccactcccagtaccaatttactgtattagtctgttttcatgctgctgataaagacataactgagactgggcaatttacaaaagaaagaggtttattgggcttagaattccatatggctggggaggcctcacaatcatggtggaatgcaaggaggagcaagtcacatattatgtggatggcagcagacaaagagagagcttttacagagaaactcccatttttaaaaccatcagatctcatgagactcattcactatcatgagaacagcacaggaaagacccacccccatgattcagtcgtctcccactgggtccctcccacaacgtggggaaattataggagctacaagatgagatttgggtgggaacacagagccaaaccataccaatcagtgttaaaaatgcaatgattttgcctgtatttaagagatcatctagatgtttggaaatattccagtgctgattgtccagataaaaaacaagtaaaaatcaagtgcaaagaatgaccatacctaaaaccctccaatgtaagattttacttagaaaaactaaaagaggctactctgttagagacacttgatcacataagtaaaataataaaatgtatatgtccattctcttcttatgggctactgtggattaacattctgcaatattgtggctaagtatttcccaaaattgaagaacaagaagtacgataattatgttaaaaaataaatgcttgtttgaaaatttcttagttatgttttgttaattgtctatacacacacatttatgaggcatcattaagttctttctttactgatcactaggtctgtaactgtctaagcctgggtttctcagaaaggaaagcctgcatctacaacttgtgttccattctttgattgggatatgcaccatttaactggagaagcaggagttgatgagggtaggagaaaggataatataagggtacaatactcagttaattgctgattgtcttcaagtataaggaattcttcagtctggtgtaatcatctttcaggtgcccataaaaaatcctgcatcttggaactgtgctctcagctttttattcatctgctcccatccctcattgttcaaatatttgttttatgcgtattagcctctcccacacttctgggttacacatgtgtgatggaatcaggtcccactgaccctgatcattcaggggcaagaagaggaccccctaggagaaagacatgtgctgtcagtctgtgcctacatgagatttgtcacctcagcaggagctgggtaaaactcatacagaactggtgggataaactgggtagcataaataggaattcctttactcatccttccattcatattccaggctctgttctcagcatagtgatacaaagattaaatggcacaattcctacccgagaagaaattaaattatagtaaagatacagaccaaaaaaaggaaactaagttaaagtgtgtcagtactaacatgggaaatatatacaaataaacgtgtaagtctgtctgctgagattaagccatgaattgaaagaaaatattcattgggcagaaatgtaaccgaatgagtaaggattaaccaggcatagaggctgggaggaagaccttggaggctgagtttgttaaagactttctgacatatgcagggtaaatgacaagtcactattgctaaagcttcatataccatgaggggaggatgagagattagacaagtctggtttgcagagaccagattatcactaacattttttgtcctttgagaaaagtgatatttatggtaatggtaatgaggagtcatttagaaaaataattgagcagtaatagttgataaaatgtacacgttaaatagattagtctcaccataatgtgggggatgtactacaggggtgaaaccagggcataaatcaaccagaaaaaaagactaataaaattcttgggcacccattcttcctgctttacatgactgtgggaaggatgaaatgaaaccatagatgtggatgccagaggaaccataaaacatcacagaaggctgggcgcagtggctcatgcctgtaatcccagcactttggaaggtcaaggcaggaggatggcttgagcccaggacttcgagaacagcctgggcaacatagggagaacttgtctctacaaaaattaaaaaattagctgggcatggtggtgcataactgtggtctcagctacttgggagactgaggtgggaggatctcttgagcccaggaggatggggctgcagtgagccatgatcatgccactgcactccaacctcggcaacagagaaggccctgtctcaaaaagaaaaaaaaaagcataatggagaatgagaatgagatatccatagtaatgctgtgtatatctctgttgtcctttgcccaaggcaggtctttaccctatatctgccagtctcccaccttcagaggttctgacttggcaaatctactgtttagcattcatattttgaaaaaactgccccaatgattctgataaacactgaactagttttttgagtatttgattttccttacaaactaatgcaaacacaagtggtgggtttttcttcacaagactgagtaatgatttggtccagaaatcacccagtcttcatcataagccaggatatcctcagctcagtacccaacatgaagagatgacaaaagctttcttgggtaacatgcccctttctttcctctggggtctgattagaggtgttctgcctaagtttttcagcagttgtagtttaaaatcttctacatctgctgagagataatgtcatttccctcaaaccagatgggttatattcctgagagatatgtacaatttttattttcttcaaacacccagaggaatcaaagagactggcaagatacaagcaattaatattcacatttccactcagctgcatttgtacacctgagaggaactgcaggcatgatgtagtggcaaaccagatggacttctatttgatctgatttcactgggctgctttttaaatttggggactccattttgagttttcacttttgtatagttaggctcccacaggtttcggtccgaaacagaaagcatcagattttaagtggaattttgaggagcaacttgacaattaaaactcaagagaaatgtggaactacacaagcctgccttactctttctctttttctttctttccttctttctctttcttcctttgtcattatggctaggtaataatcacaggtataaatttctacttacaaacagggacacatcaaatcccatttttaaatgttctccacatttgaccttagcctcctttctcactaggctagtagaaagccatctcagataatcttaggataccctaagttatgccacaattcctgcatctagaactatagttccaagtaatgtgttattgacgagctgtccacacaggcttcccctgttctaagagacttactgtccctgtccacgtgagccattcaggtctggaagtcttctgttattttttgtgactccatcccctctgctatctccctagggcactcactatttgtgggtccccagagtctcacacaccattctcttcaacctttcttccagcctataaaaatatccttcaaagctgacacacaaaatattacacatttattttcttgaaattgcacaccacttgctcttaaattaccattttggttaaagaagaaaaaatattaagctcactaacagtaattcagttttatccattctaaacctattgactaaatctttaattcatttaaagttcaaatttcatattagatctatttaaaaaaaaactatttcaagggctttcctctgttgtctttttcttcttaaggtagaaatgagaggcttacacattaactggcattgggtaggaaggggactcttccacgtgcagtcctctgagtccttgttggactcagagatatctctgagttggacttgttggactgagatatttcacacccttcatggtcactgagcatccattgttggtacccactcaaatgtggttagtctcatctgatgatttaggcatttactggcaccaactgctaaaatcaatggcccttgcaaaagcctcttgtccctaaatgtggcctctctatcccaagatcaggtttctaccaaaccatcagagctctagaaatgtttgtaactgcttgaggatttggatgttctggctgctttcttcacaccttattggggaatgcagagatctatgaagctgtcttcagattgacacattgagacatcttcttgagcaaggaaaacatttctgaaagtatttttaaaatattatcctgttactgtaatacacaaaactatccaactgaatacttagctgagcctcagtctcctcctctataaaagtgaaggttgtacacatttattctggcattttttctatctctaatattctctcttcataaattctgcatccagtaggtcctaggaagaagcacaatgcaacaaacagaaatgccaagaacaggaccatttgaaaggagacaacaagtagaaacagaaaaaagcaatagatgttaaaggtaatggaagcccatataatatatatatatgtttgtttgtgtgtgtgtgtgtatgtatatgtatatatatatgtatatgtatgtgtatatatatgtgtgtgtgtatatatatatatatagatagagagagagagagagagagagagagagagaaagctggcagaaaaggcaacaggcaatatagggatagataatatcatggaacctaccaacactaactattgaatcaagagggcttgtcaagtttgtcaagtggtaggaagagaccaaatactgagctaggatttaggtagatgatgtcagacactgggcaagcagaggaaaatgaagcagagaaaagcagggtttacattacaaataatagagtaagtggcaggtcatgaagtcagaacggaagcccagaaacaagacagaagtaaaattttcagaactggggtgcacgatgagaactagactaacagcaagagtaacctgattctgactcacaaaatgttagtttaaggctccttaaatctctcctgcttaggaataagtttaagagactttgacagactatcatcaggaaataaggtcaagtaacacagctatgagaacaaaaagtttgcaaaggctggaaaacaggcagaatcagccttaatttgcaatgtgtttgaggattctattatcaactctaacacaagaggtttttaaagacctgtggtctttttaaaactgaaggtatttgtcaaggcatccagaagacctttatcacaattaaaattcacattatatatggaataaacagtataaatctatttttaaaacattatattctatcccatttatttttcatttataaccttttaaaattgcaatgtgacacacatgaaaaaatgcatatctcacaaatgaatcattaaaatatgactacacctatgtaacccttacccaggtcaagaatagaacatgactggcaacttggaaggtctactcatgcctcatcttaattattttaaatgtagctctgaattgtgttttgagaaagataccggttccatttaagaatcagaagcaagagaggctgagcaagatggcagaatagaaaactccaccaaatatcctctccacaggccaccaatttaggatctatctacacggaagaaacactttcatgagaaccaaaaatcaggtgagccttcatagtacctagttttaactccattatcactaaaagaggcattgaagagatagagaaaaacagtcttgaattgtcaacatcaccccaacctcagccccctccaaccttagcagtagaggcatggtacagagagcaactctgggtgctggggagggagaacacagtaattgtgaggcattaaacttagtgctgtcctgttagagtagaaaggaaaatagaaccaaactcagctattgctcacccatggagggggcattttaatcagccctagccagagggaaatcaccaaaccccgtggtccaaacttgagttcccacagacctcaccaccacaagctaaagtgctctgtgatctatataaacttgaaaggcagtctaggccataaggactgcaactcacagtgagtcttattgctgaactaggcccagagacagtggactagagtggcacatgacctaccaagacaccagctggggcagctaggggagtgctggcattacccttcccctaactacaggctgcacagctcatggcttgaaaagagatcccttccttctgtttgaagagaaaagatgaaagagtggggaggacttcatcttgcatcttggataccagctcagccacagcagtatatcacactggtcagagttgcgaggccgctgttcccaggccctagtttggatgacatttctagacacatcctgggccagaaggaatctcacttccttgaaggaaaggactcagtcctggcagcattcattatctgttaactgaaaagcccttgggccatgaataaccagcagtgatacccagatattaagatgagggctttgggtgagcctctgagagttgttggcttcaggtgagacatagcacattaccagctgtggtggttatgggccaataccccttctgcttgagaaaagcagagggaagagtaaaggggactttattttgcatctcaggttaccagcacagccacagtggggtagagcaccaagtgggcttttgggatccctgatttcaggatttgactcctggatcctatctgtgcacctgcccttggccaaaagggagcccactgccttgaaggggtgagtcccaagccaggcagccttccctacaagttgacttaagagccattgggtcttaaggaaatattggtggtagtctgtcagtactctctgtggctgggttatagtggtagttatgggggaggctcctctgcctttggaaaagggaaagaagagtaggaaaaactgcatcttgtggtatgagtgcaagctcagctgcagttcagtagaacaccaggcagacttttaagctttttgaccctagcccctgacctttaaatggcacttctagacccatctggggcatgggggaacctgctgccatgaagggaagaacataggcctgactgggtttgccacctgctaactgcaaaaccccaaggccttgaaaaaacatagggcatggttaatgcaggctttgtgggaggcacagtgctgtggtggattcaggtctgacccagtgcagtcatagatgtggtggctatagggatgcttgtatcactctgctcccagctttaggtggctcataacaaagaaagatactttttttttttgagaaagtgaaaaaagaacaagagactctttctggtaatccagagaatccccctggatcttgttcaagaccatcaagatggtacctatatgagtctgcaagaaccacagtgttactgggcttaggtactccctaaagcagacacagcttagttcacaacacccaagtcttttcaaagatctggaaagccttcccaaaaaggatgggtccaaacaagcccagacagtgaagactacaagacatacccaactctttaatgcccacatactgaagaacatctactgacatcaataccatccaggaaaccatggcctcacaaaatgaactaaataagcaaccagagaacaatcttggagaaacaaagatgtgacttttcagatagataattcaaaatagtggtgttgaggaaactgaaagaaattcaatataacacagagaaggaattcagaatttcatcagataaatttaatgaagggattgaaataatataaaagaatcaagcagaaagtctggagctgaaaaatgcaacagacatactgatgaatgcatcagagttttttaatatcagaattgatcaagcagaagacagaattagtgagcttgaagacaggctgtttgagaatacacagaggaaacaaaataaaaaataataaacaatggagtgcttctacagaatctagaaaatagcctcaaaaggacaaatctcagagctattggccttaaagaggaggtagagcaggagatcccaaacctagagaaagatatcaacatccaagtacaagaagattatagaacaacaagaagatttaacccaagcaagactacctcaagacatttaaaatgaaactcccaaagatcaagagtaaagatgggatcctaaaagcagcaaaagaaaagaaacaacatacaatagagctctcacatgtctgacagcagacttttcagtgcagaccttacaggccaggagagagtggcatgacatatttaaagtgttaaagaaaaaaaacttttaccctagaatagtatatcctgtgaaaatatccttcaaaaataaaacagaaatgaagactttcctagacaaacaaaacctaagtgaattaatcaacaccagacctgtcctagaagaaatgctaaaggtagttacttcaatcagaaataaaaggatgttaatgcacaataagtaatcaactgaatgtacaaaactcactggtaatggtaagtacacagaaaaacacagaatattataacactgtaaatgtggtttgtaaactactcatcataaacagaaagactaaacaataataaaaaataacaataatttatcaatacatagtaaaattagatataaatagaaacaacaaaaaagtgggggatgaagttaaagcatacagtctatattagttttctttttgcttgtttgtttatacaaaccatgttaagtagttatcaggctaaaataatggttataaaatagtatttgcaagcttcatgataacctcacaacataaacatacagtggatacacaagaaataaaaaggaagaaattaagttatttcaccagaggaaattaccttcactaaaggaacaccagaaggaaataaagaagaggagaccacaaaacaatcagaaaacaaatgaaatagcaggagaatgtcctcagttatcaataattacaatgaatgaaactggactaaacattccaataaaaagaaacagagtggctgaatcagtgaaaaaaacaagaccctttgatctgttgcctacaagaaacacacttcaccaataaaaacacagactgaaaataaaaggatggggagaacctggaagatccctcacttggaggaaagcacaagaatgtagatgcacagtacatgatttggaaattcagatagctggtggaggagaacggccaaccaaaggcagctagtgtatgccactctcatagagagaaataggatgagtaaatatagcaccttcaactgaaacatcctggcacacgtggggattcatcaagaaaaacctcaacccaagaagaacaaagaaaagtatggcaggacccacccaagagtgacacagagccagtgaagcctctaaaaagaaacgatgcaagaactttggcaactgaaatagccagacttattccctacaaatgacagcaccagttctccaacaagggttcttaaccaggctaagttggctgaaatgatggaaatgagattcagattatggatagcaacaaagatcatcacaattcagaatgacaaaactcaatccaagaaaactaagaatcacaataaattgatacaggagctgacatatgaaataactagtatataaaagaatctaactgctctgatagagctgaaatcacactacaggaatttcaaaatgcaatcacatgtattaagagcagaatagacaaagctgaaaaaagaatctcagaacttgaagactggctttctaaaataaaagttagaaaaaaaaaataaagaaaaggaatcaatgaaacctctgagatatatgagattatgtaaagagaccaaatatatgaaccactggcatccctgaaaagggtgaggagaacacaacttagaaaccacatttcatgatatcatccatgaaaacctccccaacctcactaaagaggccaacagtcaaattcaggaaatacagggaacccttgcaagattctacacaagaaaataatcttcatgacacataatcatcagatttttcaaggtcaaaatgaaaaaaaaatgttaaagacagctagagagaaagagcaggccacccacaaagggaaccccataaagctaacagtagacctctcagcagaaatcccacaaatcagatgagattgagggcctatatttaacattcctaaagaaaaaaaaaaatcttcaaccaagaattttatatccagccaaactaagcttctgaagtgaaagagaaaagatcctttcagataagcaaacattgaagaagtttgttacagtgagacccacctttcaagagatctcgaaaggagcatcaaatatggaaaggaaatactattaccaggcaatacaaaatactattaccaggcaatacaacaacatatttaaatacagaccagtgacaacttaagcaaccatgcaaataagccagcataataaccagctaacaacacaataacaatatcaaatccaaacacataaatactaaccataattgtatatgggctaaatgtcccatttaaaaggcacagagtggcaagttggataaaaaagcaagaaccaataatatgctgccttcaagagacccatctcacatgcaatgacaccataggcttaaaataaagagatggagaaatatcttccaagcaaatggaaatcagagtacaacaagggttgcaattctaatatcagataaaatagacattaaaacaacaaagaccaaaaaaggacattacacaatggcaaagggttcaattcaacaaaaagatatatgcatatatcacatatatatagatatatatatagatatagatatatatagatatatatcctaaatatatatgcacccaacacaggaagtaaatgcttagagattttcctgcagacttagactaccacacaataatagtgggagacttcaacactccactgacagtattacagaggtcatcaaggtagaaaattaataaaaatattcaggacctgaaatcaacattgaaccaaatggatctgatagacctctaaagaactcttcacccaaaaacaacagaatatacatttcatcaccacatggcacataatttaaaaccaatcacacaatcaaacataaaacaatcctcagcaaatgcaaaagaaatgaaattatgcccaacacactctcagaccacagtgcaatcaaattagaaatcaagactaaaaattttgctcaaaaccatgcatttatgtggaaattaaacaaactgctcctgaataactttggtataaataatgaaattgaggcagaaatcaagacgctctttcaaactaatgagaacaaagatacaacatatcagaatctctgggacacagctaaggcagagttaagagtgaaatttacagaaataaatgcccacaccaaaaagttagaaagatctcaaattagcaacctaacatcacaactaaaacaactaaagaaccaagagcaaactaaccccaaagctagcagaagacaagaaataaccaaaaccagagctgaactaaaggagatgaagacatgaaaaattattcaaaacgttaccaaatccagaagttggctttttttaaaaaaaaaaaaaaaaaaggaagataggccactagctagatgaataaggaagaaaggagaaaatattcaaatcaacacaattagaaacaacacagggaatgttaccaccaacaccacagaaatacaaacaaccatcagagacaactacaaacacctccatgcacacaaactagaagacctagaagagatgaataaattcctggacacatacaccctcccatgactgaaccaagaggaaattgattccctgaacagaccaataatgagctctgaaatttaatcggtactaaacaggctaccacccaaaaaaagcccaggaccaaatgtattcacagccaaattctaccagatgtgcaaagaagagctggcaccatttctactgaaattattccaaaaaactaagaggagggagtcctccccaactcattttatgaggccagaatcatcctgataccaaaatctggaaaagacacaacaaaaacagaaaacttcaggccaatatccttgatgaaaatagatgtaaaaatcctcagcaacattattgcccaccaaatccagcagcatatcaaaaagcctattcaccacaatcaagtaggctttatccctgggatgcacgtttggttcaacaaaaacaaataaataaatgtgattcatcgcataaacagcactaaagacaaaaaccacactattgtctcaatgcatgcagaaaaggctttcaataaaattcaacatccttaatgttaaaactctcaataacctaggtattgaaggaacagcctcaaaataataaccgtcatttatgacaaacccacagccaacatcacactgaatgggcaaaagctggaagcattccccttgaaaactggcacaagacaaggatgccatctctcaccattcctattcaacatagtattgaatgtcctggctagagcaatcaggcaagaaaaaggaataaagagcatccaaatagaaagagaagaagtcaaactatcctggtttccagacaacatgattctatacctactataaaaaaaaaagaaaaacccatagtctaagaccaaaagctccttaagctgataaacaacttcagcaaagtctcaggatacaaaaccaatgtaaaaaaatcactagcgtttctatataccaataacagtcaagatgaaagccaaatcaggaatgtaatcccattcaaaattgacacaaaaaagaataaaatacctaggaatacagctaaccagggaggtgaaagatatctacaaggagaactacaaaacactgctcaaagaaaacacagatgacacaaacaaatgcaaaaataaaaaataaaaattccatgctcatgaatagaaagaatcaatatctttaaaatggccatactgcccaaagcaatttgcagattcaatgctattcctattaaactaccaacaacattcttcgcagagctagaaaaaagctttaaaaaattcatatagaacaacaacaacaacaaaaaactgcctgaatagccaaggcaatcctaaggaaaaagaacaaagttggaggcataatattagctgacttcaatctacactacacgactacagtgactaaatctcatggtactggtacaaaaacagacacatagatctatggaacagaataaggagccaagaaataaggccacacacctacaactttctgatctttgacacagctgagaaaacaagcaatagggaaaaactatctatttaataaatggtgctgggataactggctaaccatatgtagaagattgaaactggacctcttcctttcaccatacataaaactcaactcaggatggattaaagacttaaatgcaaaacccaaaactaaaaattctggaagaaaacctaggcaataccactctggacacagtaactggcaaatattttatgacaaaaatgccgaaggcaattacaacaaaggatcattagtggctgctataagcaacaatatgccaataaattcaaaaatctagaaaaaaaagtacagactcctggacacatacaacctatcaagactacaccatgaagaaatccaaaccctgaacagatcagtaacaagcaatgagatcaaagtcataataaaaatatctcccagaaagaaaagcccaggacccaatgttttcactgttgaattccaccaaacatttaaagaagaactaataccatttctattcgaactgctctgaaaaatatacagaagacagaatacttcttaactcatcctataaggccaatattacccggataccaaagccagagacacatcacaaaaaaaaaaaaaaaaaaagaaaaaaaagaaaactacaggccaatatatctgatgaatattgatgctaacatccccaacaaaatactagcaagccatattcaacaatacatctaaaagataattcattatgaccaatcaggatttatcccaggtatacaaggataattcaatatatgcaaatcaataaatgtaatatatcatatcaacagaaggaaggacaaaaaccatataataatttcaattgatgctgaaaaagcatttgataaaattcaacatcccttcatgatgaaaaccctcaaaaaactcagtatagaagaaacatacctcaacataataaaagctacatgagacagattcacagctggcatcataataagcaggggaaaactgaaagcctttcctctaaggtctgaaaagatacagggatgtccactcttaccactattattcaacatagtactggaagtcctatcttgagcaatcagacaagagaaagaaatgtagggcatccaaactggaaaggaagaagtcaaattatccttgtttgtagatgatatgttcttatatttgaagaaatctaaggactccagcaaaaacattttagaatttataaacaaattcagtaaagttgcaggatacaaagtcaacatacaaaagtcactagcatttctatatgtcaacagtgaacaatctgcaaaataaatttaatatttaatcccatttataatagccccaaattaaattaaatacctaggaactaagaactgaaaggtctatacaataaaaagtataaaacactgatgaaaaaaattgaagaggaaacaaaaaacttgaaaaatatttcatggtcatgggttgaaagaatcaacattttcaaaagcttcatacacccaaagcaatctacagattcaatgtaatctctatcaaaataccaatgacattattcacagaaatcaaaaaaaatcctaaaatttatatggaaccatgaaagatcccaaatagcgaaagcttttctgaccaaaaagaacaaccctggaggaatcacattacctgatttccaattgtgctacagagctatagtaaccaaaacagcatggtactggtataaaaaaagaaacatagactaatagaacagaatagagaacccagaaacaaatccacacacctacagtaaactctctttccacaaagaagccaagaacataacctagggaaaagagagtctcttcaataaatggtgctgggaaaatggaatatccatataccaaaaaaataaaacttgacccttatatctcaccatatataaaagtcaaataaaaatgaactgaagccttaaatctaagacctcaaactataaaaatacaagaaaacactgaggaaactctccaggatattagagtgggcaaggatttgagtattaccatataaaaataggcaatcaaagcaaaaatggacaaatggaatcatatcaagtcaaaaagcttctgcccaacaagggaaacaatcaataatatatatagacagcccacatagtagggaaaaaatttgcaaattaaccatcggacaagggattgttaaccagaatatataaggagcacaaacaactctgtagggaaagatctaataatctgatttttaaatgggcaaaagatttcaatagacatttctcaagacatacaaatggcaaacagacatatgaaaaggtactaaatatcaatgattgtcaaataaatgcaaattaaaacttcaatgagatatcatctcatcttggttaaaatggcttatatccaaaagataagcaataaaaaatatgggtgagaaggtggggaaaagggaaccctcatacaatattgataggaatgtaaattagtacaacccctacggagaacagtttggaggttattcaaaaaactaaaaatagagctaccatgtgatccaataatcccactgctgagtaggtaactccccaaaatgaaatcattatgttgagtggtatctgcactctcatatttgccacagctctgctcgcaatggccaagatttagaagcaacctaaatgtccatgaacaaatgaagggataaagaaaatgtggtacatatacacaatagagtactattcagccataaaaaaagatagagattcagtagaaggatggttaccagatgctgggaagggtattggttgggttgcggaggagatgggaatggttaataagtacaaaataaatagaatgaatgaataaaacctaggatataataacataagaggggattatagttaataacaatttaattatacattttgaaatactaaaagtataatttgtttataattcaaaggataaatacttgaggagatgaatatcccattttatatgatgtgattattacacattgtatgtctgtatcaaatcatttcatgtgcctcataaatatatacacttattctgtacccacaaatgttaaaaataaatgattattattatttgttaagttctagggtacatgtgcacaacgtgcacatttgttacataagtatacatgtgccatgttagtttactgcacccatcaactcgtcgtttacattaggcgtttttcctaatgctatccctcccccagccacccacccccgacaggccccaatgtgtgatgttccccgccctgtgtccatgtgttctcactgttcaattaccacctatgagtgagaacatgcggtgtttggttttctatcctgtgatagtttgctgagaatgatggtttccagcttcattcatgtccctgcaaaggacatgaactcagccttttttatggctgcatagtatcccatggtgtatatgtgccacattttcttaatccagtctatcattgttggacatttgggttgcttccaagtctttgctattgtgaatcatgccacagtaaacatacgtgtgcatgtctttttagtaggaggatttataatcctttgggtatatacccagtaatgggatcaatgggtcaaatggtatttctagttctagatacttgaggaatcaccagactgtcttccacaatggttgaactaatttacactcccaccaagagtgtagtagcgttcctatttcgccacatcctctccagcacctgttgtttcctgactttttaataatcaccattctaactggcatgagatagtatcacactgtgattttgatttacatttctctgatgaccagtgatgatgatcattttttcatgtgtctgttggctgcataaatatcttcttttgagaagtgtctgttcatatcctttgcccactttttgatggggttgtttttgtttttttttttttttcctgtaaatttgtttaacttctttgtagattctggatattaaccctttgtcagatgagtagattgcaaaaagtttctcccattctgtaggttgcctgttcactctgatggtagtttcttttgccatgcagaagctctctagtttaattagatcccatttgtctattttggcttttgttgtcattgcttttggtgttttagtcatgaagtctttgtccatgcctatgtcctgaatggtattgcctaggttttcttctagagtttttatggttttaggtcttacatttaagtctttaatccatctttggtaaatttttgtataaggtgtaaggaagggatccagtttcagctttctacatatggctagccagttgtcccagcactatttattaaatagggcatccttcccccatttcttgtttttgtcatgtttgttgaagctcagatggttgtagatgtgtggtgttatttctgaggtctctgttctgttccattggtctatatctctgttttggtaccagtaccatgctgttttgattactgtagccttgtagtatagtttgaagtgaggtagcatgatgtctccaccgtttttctttttgcttaggattgtcttggctatatgagctcttttttgattccatatgaactttaaagtagttttttccaattctgtgaagaaagtcattggtagcttgatgtggatggcactgaatctataaattaccttgggcagtatggccattttcacaatattgattcttcctatccatgagcatggaatgttcctccctttgtttgtgtgctcttttatttccttgagcagtggtttgtagttcttgaagaagttcttcacatcccttgtaagttggattcctaggtattttattctctttgtagcagttgtgaataggagttcactcataatttgactctgtttgttactggtatagggatgcttgtgatttttgcacattgattttgtatcctgagattttgctgaagttgcctatcagcttaaggagattttgggctgagaagatggggttttctaaatatacaatcatgtcatctgcaaacagggacaatttgacttcctcttttcctaattgaatacgctttatttctttctcttgcctgattgccctggccagaacttccaacactacgttgaataggaatggtgagagagggcatcgttgtcttgtgctggtttttgaagggagtgcttccagtttttgcccattcagtataatattggctgagggtttgacataaacagctcttatcattttgagatacatcccatcaatacctagtttactgagagtgtttagcactaagttgaattttgtcaaaggccttttttgcatctattgagataagcatgtggtttttgtcattgattccgtttatgtgatggattatgtttattgatttgcgtttgttgaaccagtcttgaatcccagggatgaagctgacttgattgtgatggataagcttttcgatgtgctgctggattcagtttgccaatattttattgaggatttttgcatcaatgttcaatagggatattggtctaaaagcctcttttcttgttgtgtctctgccaggctttggtatcagaatgatgctggcctcataaaatgagttagggaggattctctctttttctattaattagaatagtttcagagggaatggtaccagctcctctttgtacctctggtagaattcggctgtgaatccatctggtcctgaactttttttggttggtaggctattaattattgcctcaatttcagaacctgttattcatctattcagagtttcaacttcttcctggtttagtatcaggacagtgtatgtgtccaggaatttatcagtttcttctagattttctagtttatttacatagaggtgtttatactattctctgttggcagtttgtatttctgtggaattggtggtgatatcccctttatcgttttttattgtgtcgatttgattcttctctcttttctgctttattagtcttgctagcagtctatcaattttgttgatcttttcaaaaaaccagctcctggattcattaattttttgaagggtttttcgtgtctttatctccttcagttctgctttgatcttggttatttcttgtcttctgctagcttttgaatttgtttgctcttgcttctctagttcttttaattatgatgttagggtgttgattttagatctttcctcctttctcttgtgggcatttagtgctataaatttccatctacatactgctttaaatgtgtcccagagattctggtacgttgtgcctttgttctcatctgtttcaaagaacatctttatttctgtcttcatttcattatttacccaggagtcattcatgagcaggttgttcagtttccatgaggttgtacggttttgagggagtttcttaattctgagttctaatttgattgcactgtggtctgagagacagtttgttataatttctgttcttttacatttgctgaggagtgctttacttccaattatgtggtcaattttgggataagtacaatgtggtgctgagaagaatgtatgttctgttgatttggggtatagagttctgtagatgtctattaggtctgcttggtgcagagctgagttcaagtcctggataaccttgttaacatactcgcttgttgacctgtctaatattgacagtagtgtgttaaagcctcccattattattgtgtgggactcgaagtctctttgtagctcttaaggacttgctttatgaatctgggtgctcctgtattgggtgcatatatatttaggatagttagctcttcttgttgaattgatccctttaccattatgtaatggccttctttgtctcttttgatctttgttggtttaaagactgttttatcagagactagaattgcaaaccctccttttttttgctatttccttggtagatctttctctatccctttattttgagcctatgtgtgtctctgcaaatgagatgggtctcctgaatacagcacactgatgggtcttgaccctttatccaatttgccagtctgtgtcttttaattggggcatttcgtccatttacatttaatgttaatattgttatgtgtgaatttgatcctgtcattatgatgttagctggttattttgcccattaattgatacagtttcttcttagcatcaatgttttttacaatttggcctgtttttgcagtggctggtactggttgttcctttccatgtttagtgcttccttcaggagctcttgtaaggcaggcctggcagtgacaaaatctctcagcatttgcttgtctggaaggattttatttctccttcacttatgaagcttagtttgtctgcatatgagattctgggttgaaaattcttttctttaagaatgttgaatattggcccctactctcttctggcttgtagagtttctgctgagagatctgctcttagtctgatgggcttccctttgtgggtaacccgatctttctctctggctaccctaaacatttttttcttcatttcaaccttggtgaatctgacaattatgtgtcttggggttgctcttctcgaggagtatctttttggtgttctctgtatttcctgaatttgaatgttggcctgccttgctaggttggggaaattctcctggataatatcctgaagagtgttttctaactttgttccattctccccgtcactttcagatacaccaatcacacatagatttggtcttttcacataatcccatatttcttggaggctttgttcatttcttttcactcttttttctctaatcttgtcttctcactttatttcgttaatttgatcttcaatcactgatatcctttcttccacttgattgaattggctattgaagcttgtgcatgcatcacgaagttcttatgctgtggttttcagcccgatcaggtcatttaaagtcttctctacactgtttattctagttagccatttgtgtaaccttttttcaaggtttttcacttccttgagatgagttagaacatgctcctttagctcagagaagtttgttataccaaccttctgaagcctacttctgtcaactcatcaaggtcattctccatccagttttgtttctttgctggcgaggagctgcgatcctttggaggagaagaggcactctggtttttggaattttcagcatttctgctctggtttctcttcatctttgtggttttacctacctttggtctttgatgttggtgacctacagatggggttttggtgtggatgtggccttaatctctgcaatccctccagggatacagtattgtttttgatttactatctttctaggtagaagcagctctaatggcttcaatttgctgtttcccaacattatagcccacaccttaccagtcagggagccagtgtgggggttctgtcagctgctaaatatgtctatgccaattatgcattctggtgctgaggaaatgaccacagggtgagtccagggacccactggacccagtgtaagtcagacctgagctaaagctccattaattgcctgacctccataagctcctacataagctcctactttaactggaggacaacaatgatgttttgggtcccctggaatcaacgtcagctcaaagccagtgtccagtagtccccaaagtgtctgatcattcccctcttcccagtgcacagttatcctggtaaaaggccctaggtctccttggggaaggatgaggtaaagattcactgcataaattgtcaataaagtagtacttcctcaaggggacccagcctccccttcattgaaggggttctgggtctataaactggctcaagtctggaaattgattgaggggccatgattccctatttttataattcaaattagtcttttgtctatttgacctagaagttttctgtttgtataaattaagtaggaatgcagtaggcttcctatcagtttcacttctaggaacactatgatttatgcaatgctagaggtctacatgagtcaggctattctgattgccactttgcctctgctgtccattatggtagctatgcccaccttccctttggtggttgagtgccaccacttggcccctcccacctcgggatccaattattcccattgtatttaaattctgtagttgagtgactgtggtctccactattagacctgacatacagagaacagcaattacaggactcttcaaagatgcaggtgcaaccctcacaaatctgttctgtaaggcactggacaaggatatgtcttctagaccctcccagctgggatgagtaggtctagagtgattaatccactccaccatcccaatctccctaagcctttggatctcttcctccacattaaaccaaggcagatcaggcatttccagctcgctcacagtgggccatctgttaatccatatttcagctaccaagcaaataaactattagaaccttttataaggttccccgagctgaaacattaaatgcagagtccctacttagtggacccaaatcaataaattcaacctgatccaactctatgttccttccaccactatcccataccttaatatccattcccatatctgttctccagatttctgtttacataaattagaaaactcaagcagttcttttcgagtgtgtcatacatcatgggtcacactctcaacctcacctttgggggcccactgtgactttagtctagtcataggtccagaagcaaacaggggtgttgggggtggctactgaggagaatcaaaattatctttcctggcaactgcctcaggggaggccaccaatgttgcctcaggcagcacagagtttatctcctcagacaaagatggaaaggcttatggcagcatgggttgaggaggagacgttgccactactggggatggggaagctgtttcttctggcaagaaaacgttcatcagaatttacaaactcagtgttcccagcttcatcagggtcttcccatatggccccattccaagttgcagggtcccattcttttccaatcaatgccctcactttgacaatagacacctggagaggctgtgcatgcaccattcattgcagcaagccactcacatgataagagcttgtgtctgtttttccacaatttcagttaactctctacaggagataagactgtcaactcagggcaatcttagcagatttgaggctcagtatctgcttctgaagccaggaaatagaatctgagttcatcattttctttcattattttatccactgaacttagaagcaaccaaccagcttcattatgttccttggctctccacatatcgtcaaaggtattatgcagagtcactaaactccctgccactcgtgagcaatgaatgagaaatgtcaagtgcacttattttgcataactttctacacagttaatgccaaggactatcagtgttctccatactattagcaatagagttcttagcattttgggggctaatcatattactcagccaactccagaaaccccaaaaccaatgaaagagctccatccttaatattctgttcctctagaaccactcctagtactaaaatctgtattagtcagggttctttagagggacagaactaaaggaatatatatatatatgtataaagggaatatatatatatatatgtatatacatatataaagggagtttatatatatgtgtatataaagggagtttatagatatatgtgtatatatatataaagggagtttatatatatatatatatatatatagttctctagagggacagaactaaaggaatatatataatgtatgtgtattcctaaatatatatatatatatatatcctaaaggaatatatatatgtataaagagaatatatacatgtgtgtgtatatatatgtgtgtgtatatatatatgtgtgtatatatgtgtgtgtatatatatacatatatgtgtgtgtgtgtatatataaacatatatacacatatatgtgtgtgtatatatatatgtatatatatgtgtgtgtatatatatatatacacatatatataaaggggggttattaagtattaactcacatgatcacaaggtcccacaataggccatctgcaaggaggagcaaggagagacagtctgagttccaaaactgaagaacttggagtctgatattccagggcaggaatcatccagcacaggagaaagatgtagcctgggaggctaggccagtctctcttttcacatttttctgcctgcttatattctagccactttggcagctgattagattgtgtccacctaaattaaaggtgaacctacctttcccagcccactgactcaaatgttattctcctttggcaacaccctcacaaacacacccaggatcaatactttgtatcctttaattcaatctagttggcagtattaaccatcacaatcaattactaataattcccaaaataaaaaacaacagatttatatgggttccctagtgcattctatctaattgtttaggaaaaaatagtatcaattctccacaatctcccaaaaagagaagcagaaagaacactttccaactcattctataaggcgatggttaccctaatatcaaaaatgtataaagacattacaaaaaagaaaactgtaaatcaatatcactcataaacataaatgcaaactcaacaaagtattagcaaaaattccaagaatgtataaaaacatttataaaacatgaccaagcgtgtgaaagatttgttcaacattgaagaagtaatcaatgtaatctaccttatcaactaaacaaataaggaagatcatatgatcacatcaatagcttcagaaaaagaatctgacaaaatccaatacgaagtcatgtttacttttaaaaaataatcaattaactagaaatggagaacttcctcagttgataaagaacatctacaaaaacagactaacaaattagtggtgagaggctggatgttgttcccctaacattgggagcaaggcaagttccctctcattactcttattccacagtgtactgaaggttcagctattgtgataacacaagaagaaataaaaggtatatgaaatggaaagagatagataaaactgtattcatagaaggcacaattgttgaccaaaaaaatctaccaaagaatttccaaaaatctcccggaataagtgagtatagcaaagtctcagggcacaaggtcaatatacaaatgttagtcccttatataccagcaatgaacaattacaatttgatttttttaaaaaaaaattaggagaatgataatacacagcacagatagggtagtaaaactaaactttatggtattataatggtggatgcatctcattgcaaacttgtccaaacccatataatctacaacactaagagtgaaacctatgtacactatggactctattaacaaagatatatcaatgtaggttcatcaatggtaacacctatatcaccctggtggagatgttaataatgggggaagctatgtatgtgtgatcatatttgggaatcaattttgctgtgaatctaaaaccgtactagaatataaagtctattttttaaaaacgaccctaaaaatttgcagtaccactccaaaataggtgtgaaaccaacaaaatatgtacagccttggtatgcaaaaacctacgaaatactgatgaacaaatttaaaataacctaaataaatattcaatgttcatggattagaagattcaatatgtgtaagatgtcggtttgtccaaacctaatctatatattcaattcaataccagtcaaaatcttaaccagctgattcatttacatcaataaactgattctaagtcttctatggaaaaaaaaactaaagttgccaacacaatactatagaaaaataaagttagacttacataaaacatcttattgtgtcataccagtctattctgagataaaaagttatttcaactgcatacaaaaaactccacacttctacttctctgcacatgtactttatgttactgatgcaaaaatttacttctttgtatattatgcatctgttaaccaattttaatggttatagatacacttactgtgtttgtcttttaacatttataccacggttaaaagtgatttatgcactaccattacataattcattattctgtatttctctatatacttgactatacttgacagtttgagcatcttgtagtgccagaaaggaaatgctgaatgaagcgtgtatgtgtgtgcacgtgcacacacacacacatacacacagaaacagagggggttgggaattatgtcaaagggattcaagcgtcagctgaaagagctccaatggctaaagcagaaaaatgtatataaaaaattaaataaagaacattggactataacactaagtataaaataagtacccatctgtccatactgatgtaaataaatgattgaataaataaatggtagagaatagacaaatctctcatccagaaagattccacataattcatgcagacagtcagtctttaagaagatgaagcataactttctactctttaagattgggcctgtgtacagagactattcttgatatgatttggctgtgtccccactcaaatctcatcttgaattatagctcccataattctcatgtgttgtgggaggaaccaggtaggagataactgaatcatgggggtggtttcccccatactgttcttgtggtggtgaataagtctcacaagatctggtggtttagtaaggggttttcctttttgtttggttctcattctctcttgcctgccaccatgtaagatgtacctttcaccttctgccacgattgtgaggcctccccagccacacagaactgtgagtcaattaaacctctttttctttataaatcacccagtcttgggtatgtctttattagcagcgtgaaaactgacttacacagacagctctcctaccagtaaaacatggaaaacaaggaggaagatagtaacttcgcagtggagaaagctgttggaaactacctcagccaggtttgatcaaggttaacaatagtgataaatcacgctgatagtatgtttccttgatataatgtgatgagaatggcactttatctctgtggttattcctcctaaaaacctatagtatcatgagagaattatacaaatcccaatcgggggacattctgcaaaatatttgaccattactaagaattatcaaggttaacaaaaacaaggaaaatctgagaaactgaaagccaagaggagacatgacaactaaatatgatattagggatgaaatcttggaacagaaaaaaaagtctttaggtaaaaactaaggcaacttgaattaagtattcactttagattaaaataatgtatcaacattgatttattaattgtaacaaatgtactatacaagtataagatattaagggaaatcgtgtgaggtatatgaaaactttctgtactatcatatttttctataactctaaactattacaaaagaaaaaaatagatttaaataaatatgcctctttctttagttataaagaaaaactttcccagactttaaaatgatagttctaaatcccatcctttctggccatcaaggtttcagaaaaccttatttcttaacctcagcctaggttgaggtctcaagggtaggttgtagatttcaatagtaggttgcagatttcaagaactgctggaaaattcatgtaatatatgctaaaatgatgagcaagataatttaacctaaggattatgtcaaactgtaggtgaagtatccttcaagatttgtatgacaagtaaatctgcatgttaattgggatctggtgcctaatgcagtatctggaacagtgtgggtgtttaataagtgtcagctatgggaaaaccaaatacattcattcaatccattattccattaattcctcaaaaacaatgaaacaaaaaacttattcccaagaaatggaaaacagcatcctgtctcataaaactagaaattaatctttagcatgtaattaaatggactacatattataaagaaaaaaaagtgtatgcatacctgtctatgtgtatgtttcctatagagtaaacctaatatgggctgggtgcggtggctcacgcctgtaatcccagcactttgggaggctgaggcaggtggatcacgaggtcaggagatagagaccatcctggctaacacggtgaaaccccgtctctactaaaaatacaaaaaattagccatgcatggtggcgggcgcctgtagtcccagctactcgggaggctgaaggctgaggcaggagaatggtgtgaacccaggaggcagagcttgcagtgagccaacatcgcgccactgcactcagcctgggcgacaaagtgagactccgttaaaaaaaaaaaaaaactaatatgcaaacaacatggattaaattattagcttagtagaaggagtcactaaggaagtcagttcctatactttgttgttaaaaaattaactgacaacactttaaaacacatgttctcagcaccctgtcttggtagcctttggccctggctgtactcctggacatagatagagctacactggttcttcataaaccatagatacaagtaggaatttaaatgtttctaacttgtaggctggagcttatctttttctgccttcatagggtagccatgagcaaggagcctggtgaccttaacagaaagggaagatttaaggtttctatttaaatgtgttcaggaaaagcagagtttgaattaaaatttttatctcaatttcaacttcatttggttttacatctttaaatattgttctttttaaatgttgattataattaatatttgttaataaagacaaaatactagtgaatatttttaatgtttaatatgttttagaaatgataacacttttaaaaaggaaactgggcctttcttttttccaatagctaataatgaattaacctcacaaataatagaccatggcttaataacctatacaaaattattttcccttcgatcaaaataatgtgaaaaaacatgttacaaaatgtatggatttaatatgactatcataaaccataacatacactttaaaatccagtgccagattcctataggaacataataaatatttattgaatttatttgtgccatttacagattgctacttattttatgcatagccttttattaaattttgaaagcacatgggaattctgtaatgagttaaatattggctgttgacttattattttgtttcattttttgctggaaaataaacgataagactgcgtgggaattgtgtaatactttatcactcttagttatccacctatgggaagacttgctatttgaaccacccaaatctggtaccatcattaattaaagtggaagctagcctagttgtgaatatgatgcctagaaagtcacaaattacatgtttgctagtatattctattcaaacatatcaagtaatggcaaatacaaactatacactctaagtactgtcattcaatcacactctctaaataggagccacgaacaagtcttcaggggcagagcaggttacaaatgtgttaagcagccagatttccatgcaaacaggcaaacatgcatacatatatccccactactgtcttggggtaaaaatgtaatgaagctttattagaaaaatacagacaagtaaaagacacatgatcattaatacctattatcccataaaaaaagtgttttgggttggcatagctggcatgtatctgcaatgtaggtatcttcagaagaactctgtatttttaatgctctacttcaatggttattaaaatgtggtctccattgttctactctatccctatcatggactagaagcatcagcaacaactggaagcctataagaaacacaaattattggactcagtacagttgtgttaaattaactgcccttaaactttgttttatccatggaatatttagaaacctattctttaatttccaagtgtttagagatttttctgttacctttctagtatagattgctagtttgattccactacataagagaacattatgattttattttaaatttgttaagggttttttttaatggcccaagatgtagtctatcttggtgaatgttccatgtgtgctagaaaaaaatgtgtgttctaatgttactgtgtgatatgtactttaaatgccaattagatgccattagttgatggtgatattttctttatctttgtttattttctgtctagtagcattactcattattgagaaaatgtattcaagtccccagctataattgtacatgtatctatcttctatttaagctctgtcattttggcttcatgaattttaaagctttgttgtttggaacataaacatttaggattgctctatcgtgttgctgaattgacttgttattattatgtgataatcctttttgtcctagtaactttatttgctctgaaatctactttgtattatatcattatatcaatttcagttttcttttgattagcttccttggtctatgtttattctattccttcatgttcaacctatttgcatcattatatttgaaatcatccttgtagatagcttataattgaataatattttaatccattctaccaacctctctcatttccagacttctatttagcccatccagtaagttttttatttcatgtattctgtttttcagttctaaagtttcagtcttggaagtgaacataacagtccaagtcacgccttcagatgacagaagctccagccaacatcttgagtgtaaccttatgaagagaccatgagccataatcactcatctaagtcattcctggattctccactcagaatctatgaggcagtaaatgtttgttgttttaagccattgagttgtattataatttgctacacagtaatagatgataaatatacactttatgctatctgctttaaattttatgtagatagatatattaagagaggaggacttcaggtatttgttttattatgtcatttttatcaaatgggtcagtcctcagaaatactatgtccaaattgtgcaaaaataatatcagttaaaacaactccaagattttttgtcctttactgctagagaggttagtatttcccaagatacaatcagagattaggctatgtgctaaaaaatttaattaatttatgctatgaattatataatcagaccatcttggaactattcccatagataatacatttctttaaccagatcccatacatgtcatatataactttggggcaggaccctgacttcttaaagtttcttttttaaacaatctatagatgtaaattatcctcctcattccaattaagatactggtagctaaaacctcctatgggcaagcaatatatttttattcaagagatacgggaaaataccttattagagatattttatctgccttaggtccctgttaacctggaaaattaccaagctatttgaacaataaaagaattcccaaagaagccaagctcttttcagagtgagcctttaactccaaatcatcaacaaacacctgagactgcaaacatgagggcttatttgactagacagttaaaataaacaacccatatcacaaataatcactgttgctctttctaccacagactgaacaaccatccaggtggaaaaaaataacagaatggcaaaacttgcaggccaatataaaaactgtttagagaaacctctggagattctgaaaatcagagtttctagtttgaagtgattcaaagcacctgtttctagtataaactgtccagatgtaagatgatgttatagtttattctgggactaaagagataatatctgattattctatgtctataaagtcttagttattcctctgtcattcaaagtcatacaaatgaaatataatttgtgtgtatccatgcactgcttagacagatggaagcacagcaggtaggtaaacactgacattctcttccatgaataccatcaaaggaaaggtcaaagataaggtagtaagtaaagtgaatgcagattagacagaacatctgcttaaataggataatggaagaaatattcattgcttttacaaatagaattttctcttccaagttatcaatgaacatctgcttaattctacattccttgcaacctaccacattagctttctgattaaaattaatagcttgataaagtacaattagtcacaataaagaatttgtgcttttttattacaaattgttaattttgcaagcgtaagagaagttgttgttatctaagatggcctaacctagtttgagaagaaaggcattttaagagaagaaacttttaaactattcagttattctttcaaatttgcaaacgaaattagaacttccaggttttacattataattttaagtaaactactcttctaattggcaaaaagaaaggctactttgtaagaaatgaagaaataaagtaaatatgatttttttaaataatcagttggcatctcacttctcttgtagcatttaatgcttttcacttcctttgccaatttgacctccctagtttttgtgtcagaggacaaccttggctctctcatctctattatcttctttcttttctgtcacatgcaaatccctccatttcagctttctatttcaactactggtccacagattttgatttatctgaagtaggtgggatccaggcacaggcccattcattgtatgtcttgtaattttttattgtattctggacattgaatataaaaatacagtggagaccaaaatataatattgttattttgttttgtttcctcttgttttcagaaaataaaagtctttccctatgtcttaaggttagagtgtgaggctgagcataaacattattccaagaattgagtttagcttgagctgggctgcagttttaattagattgagttcactttactagcccaacttccaacttcctacaacagttatcagagatcacagtatttgagatgggggttgggttgggccacatttttagaacattttattttcagcctttaattcaaatctataaaggcccaaaatctgtaggaatgtgaaagcctgtgcaaaaatattatctgctttctagccttttctctgcaaattcttggcaaattttttgtgcaaagggcctgtacaaaaggatataattttcaggctgaatctcattatgtctagagtccaattcattctactaaattattatttaaaggttcagctggtttttcctcatccctgcaaaatctcttgatatgtcaggtcaatggttccacctggagaaacccaaaccagacatgttccctcaggtatgaatctctctggtctttaataaaagactccttcctctctggaattcagttcatcaagacttcctggttatcatcatagccccatagaaatgtatgatttttatattatgtttttttcctgttgctaaagtaacaaaagtcttttgcaactggaagcagacagctactcctcctagacgtgctgattcatcaacctatgggccttactttgagaaatatacttcagagtcatactagaaactgttttacattccctatagtctgaggcatgtacacaagccaagtaatgttcttattttatcaagacatcaaaactgcccagcttggtggctcacacctgtaatcccagtgctttgggaggccaaggcaggaggattgactggggccaagagatttagaccagcctgggcaacatggcaagaccctgtctctacaaaaaaaaatttaaaaattagctgggcatcatggcacacacctgtagtccccactacttgggaggctgaggagggaggattgcttgagcctaggaggtcaaggctatagtgagctgtgatcataccattgcactgcagcctgggcaccagagtgagactcagtctcaaaaaaaataaaaataaatattaaaactatcagccactaggaatcctatgtaaaacatctctttctagtttaaattgacattatctcaacttttactattggttactcagagcctaatcctcttctctctaattcaagtgttgaaatgtgacttgtccttaaaaagtacgtagcagatgcacatcttctatttttcctctgaaagttaaattgatatttaaaaattaatcagtacattttgtctcctctgtgttcaataaggaagaagcactgtttacagcattgcctagcacttagtggacactcagtaaatgttttaaatgaataaatagtattcattgattctggttccttccttttgtctttatcctaactctttcctcaacctcccaatttcatctctgaaaatcctagcaagaataattatcctattcattcctattttctattacaaatttttaatagctcttttttgcctactgaattaagtttaaattcacaatttggccattaatattttccacaacagggtttaaagctatatttttagcttatttctttgcaggtatcttgtgtttaaaccaaactggaagaatattctctaagtttcctgcaaatgtcctgtgtttccacgcctacatgattacgtgtgctacagatggaaattctctttttctcattgacttctttacctatcaaaatcttatgcatcctttagtacccatctcaaatgcaattatcacctagacacacaacttgatctttgaaactggacatgatccatttttccttacattcattacagcatgtagcttatacttctctaaaatgattgcttaattctatgttgtaataatacttttttttttgtttttttgtttctaaatgtgagcttcttgaaggcaggggctatactgactcctgtctatgtaccatatcactgctacaataaaagaggcaggaggcacagaaattataggcaaaaaagggcaggtccctggtaagagccccactatcaagccaaaaagcctgagatctcagcccaaagtgagaatttatatcatgttttcctgctcgaatgttgccttttcctaaaccacccttatccttaccctgccccaccctgtgcctataaagaccccagactcagctggcagagaggagaagcagctgaatgttggagaccacagctggacatcagaaagcagcggcttgacttcagagggacagcttgatggtgtaacttcggagaggaatctgaccagagatgaccagacttcattggaagattacctacacctgcttctgtccccttttgagctgagagccattttcattggcaataaaattgcccacacttaccatccttcaatttgtccatgtgacctcatttttcctggatgccagacaagaactcaagagccatgagtaaggataccaaaggttgtcacactggccctttgccatcactggtggagggaagccatgggcccactgagtttttaacacttaagccatctgtggatggcagagctaaaagagctctgtaacatgccctctggggcttcaggtgtagcaggcatcctccaccccgagatgctgctgtggggcccacatgcagttttctcctgctggcacccaaaagtgctcaccctggcttctacaactgttcacctgcacactccctcctgcaaggggtggaacatagttggtccaagtgagtggagttcactcctgccagcgccaaagtgactggctggttgcagaattcatgtactccagttcctaccttgttcactcacatgctccctcctgcaaggagttgagagcagtgagctgagtaaatgaggcaccctgttgtaagttccatgaaggggtgagggaaacatcctgctttatcactacatttcctccagcaacaatcacatcacattatatctagcatattatacacacattttaaaaaatagtataattttatatgtggaaagttactggtcacccagtttctgtgtactcacttcacccacttcatagacaaaatatatgaggctctagaaagtttaatgaattgaactgaatttcatcaaatttaaagaaacccaaatatgaaatattaaagtgattcttaagtgactccatgttagctaagattgagcataatttagttaggaaaaatatgctccataaatttcaattgtttttcatataatgtttaaattcaccatggtaggatgttccactttaattttactctgaattaaatcatcttaacagagtcaatcaagacaaacctttattcattttaatgtatcttttgtggtaaaaatgcaaagtttatagagcattcatgtagctaagacattacaggacatgcattattactcatttatgcatcttacactaatcagcacttttatatattctcattctaggcttttaaaatagtttttaaaacattaactcattcattaaaattaatgccaaattttgattttgaatatattgtataatctatcgacctgcataacagctgcttccttgcaagtagtcaaatgatattaatatcataaaactttttatttatatacttttgtatctttatttaaggagtatcagtgcttctgtgctcggtcctcaaaagaaagtcaatatgtaaagaggactggagaggtggagagtgactagccataaaacaaaagagtgtatggttcttaccttgtgacagatgaatccacacaggctcagttcacaagtaaagagccttataaacaaacataaatgctttacctccaagtctattttgtattcagtttcagctgctctaaagttgttcttttattttgtagagcagcctggaattcatcagagacaatcaagcagtataggaaaagtcaacattccactgcatagtggctccctggttacctccagcttctctggtgtcctatcataatgtctttctaacaagcagagcaacaagtgagtcatgtgtctaaatgtgtatctgaggacagatgttgcccaatggactcagaagtttgaactaattcttttgcaaatgaggtcagtccgaatctatagccttgagcttacaaacaattactcagatggaatcacaatcagccttctggaaactggacaaaccaggactctcaataaaaatgaaactttaaaatatatataaatatctgtattatattagtctggcagttatggaacattcctaactagtgttcagacagaattctgaaaaaaacagagaacatttggttctattggatgaccaaagtccctgcccaaattaaaaaataaaaaaagcctcttgacactgattttttttatgttcagggaaactttatccattgcttgacttttcaaatgttattcagtatggtgtaactgaacaatcagtaggtgtagaatcggaataactaatcaaaacacggctctagggaaacgcaacactgaaagatgaggagaaggagaaatgaaaaatggaaactggattttcctggaaaccatgcaaagacaatgcttcaagttaaatattaccaaccggagaggccaactgtgataaaaaatgtatgtataaatttactattggatgtaacattgaagtcttcagtgactttgacacgagcaatttgaatagagtggtaagaacaaaagtctgaaatggactgaaaaaatacagcaaagtaagaaatggaaatgttttaaaaaggaaaagggaaatgtgacaggagctgatgggatacacggaattaaagaagggtctggttttgaaaagagcaactcaagcatgattctatggtatattatttatctacaacaaatcatctcaaaacttagcaattgataacaatgcacttatgctcacacagcttctgagtcagaaatctaagagcagcttagctgtgcggttctagctcataaagttgcagtcaaaatgtcggctgggattacagtcatctgaagatttgactggtatggaagatctgttcccaagctcactcacattgctactgacaagatgcttcagtttctcaccaggtgggcctcaccaagcaggatggcagctggcttctggagtgaatgatgagacagagacagaaaagagagagggagaaatcaaccaagacagaaacctcagtgtgttttataacctgattgtaaaagtaacatattgttatttatgacatagtatactgatcatacaaactctaataccaagtagaaagggactacacaaaggtgtgaattccaggagacaggaaacactggaggccattgtagacaccagctaccacttacagtaaggtaaattggaggaaaggggagattcggaagaggggttaagcgtaggatgaaagtccttgaatgagaaagaatgtcagtaagtgtataagtggaaggatcagtcttagatagcagcaggtagcaaagagaaatgtagccactttaaaaggagagaggaaaaaacatggtaaatgaggtagttcctcatgactgctttatatcttgacggtggcataattaaggtcatcagttaatagtgaagaggagacagaagaatttcaaatttaaggagaatggtggtttgaatagccacttcagagcagtgaattggctaggaaaaaataatagaatttaggacagtttgggaaaagaaaaataatctagatgtgtacatgagacataaagcaggcagctaccccttcctccaagttccattgaccacaggatatgagaattaaaaaaaatagctgcaaaatcacaggatttcagggaagcaaggtccttagatgtagttaggttttagtcagagcaaaaaaaatcaggaaaatattcaggtaagaaattgaggctctaatgttttgctgatgagttctaggttgttcaatgtggagtaaggaaaggcgggaggattgactcagattgaagttgaacagagtaatagataagagatttggactgctaaagtgatggaaattatcatgatgggattaatccttatgacttcataaggtaaggtagagtcagttatatgatagttcctttcttaggattagacaatttataagtgtgagaaagagaaagaaaatggtattttttttaatggagaggagaataaagtaatatgcattcttatatccttttaagagtattaacgaagctggcaaggtatagttaataaactcaatattcctgcataaacatcagaaacttcaaatagccatgtatttacagatacagactatgtatctattaattttttattcattgagaatttctagacttattatcagacattgattttatgagacaatttttccattatgtagcttatggagtagtagaactcagcagaaaccaacctaaaatctctttggctgaatccagtgctggctaaatttcttataaagaagtaaaaaataaggaaaaacaaagcataatgctcttaaaaatctaacagggttgaaagaggattagcttttctagcatgaaaattgaattttcaaaacttaaataatgaatccttttatatttgtctcgtagtaacaaatcaaagtgaaattaggactgaaattgggatttaaactaagattaaacttaaagcttctcctctttttctttaccttcctttctctttcttttccttccaggacaacacagcccaaaagccattaggtattgttcagcaggtagacatcctgtttcatggggcagagggagcaccctggtgtggggtgccaaagtgggtagagagagtatccatatgaggagatagaagtagccatgcaggaaggtgttgggaccccagcaaagagagtaagcatccacatgggggcagaataatggcaatccagtgtatcaggaagggatggtagcaggcagcaacaacatgatattaggaaattaatcaaataaataaatatattaaatataatgggttccagactgctcattgccaaagaagggagttataaatatagaaagagagaaaactggaatgcacattgtgcatttgatttggattggaattgcagatatcagtgtgaactcatgggttttgagatagatggatggatcactagaaagaaagatagataatagatagacaaataaatatagatgtaaatgtgtgatataggatgtgtgtgtatatatagacagatacgtctatacatacatatgtagagataaatggtagataaatgatagatagatgatagttagcttagataggtaggtaggtaggtaggtaggtaggtaggtaggtaagtagattgatgcgtgtgtgtatgtatgtatccctagttctgtccactgagagagcctgttgctacccaatatcagtgagcatagtgatcattcagatcatagtttctaaacaccattcttctaaatgccattcttcactattggattttcggatgaagtactctgttgaaacatctctgggtctaactctctggctgactcactgttgtttgaaacattggatgacacataacagttattgaaaaccaattttttaaattatcaggtcagtgagattgaagaatagtagtttccagtgtttgttccctcacagaaatatcaatctgaacaattattcacacatgaaaataccttcacaagagctaagaaaaccaagtaaaatattttagtacttgggtggagcacataaaattttaagagacagattaaagagggtaggaaggagagtttcacattgcccatgtcagctatctcccaagctcactcagcatggagagagatcctccacatgtgggcaggagaatgaagtgaacatctgactttgccatagacaccagcaccagacccaccccagtgaagcttaggaccaagccagcctccatagacccaggttccaggcctgccccagtgccaaatagtttcctagttccaatctccaggcccacttctgtgtcttcagaacccaggcctaccattgcaaactcaagctctaggccactccactgccaaaccagctcctgtgccccaggatccaggcccatccccaaggacacaggcctgaccccattgaattatggtccaggcctgccctaccaccagtctggctcctgaagaaccaggatcctggtctgtttccaaagtcagacccaggactaccccaacagccccagaaatccaggcccagacccatagacccaggcaccaggcttgcccacacagacccagactccactcctgctcctgtggacccaggcactaggctagctcctatgaactcaggttcttggcccccgcacctacttagccagttaccagacaagcccacccatagaacctgccaggcagctcatctggcatctctggatggggtgactagtgaagggctttacatgccaaagccaatttgtaaaaactaaagtaggtagctatgtgtttaaatgaagagacaccaatgcaaggtcacaaggatcacaggtaatcagggaaaaatgacaccaccaaaggaataaaacattagtgactgaccctaaagaaacaaagacgtactaattgcctgatgaagtattcagaataattgtcttaaagaaactcagtgagctgttagagcatacagacagacaactaaatgaaatcaggaaaacaatacacaaacaaaataagaagtctaaaaaagagatagcaactatatatttttaaagggctaaatagaaattctggagctaaaatacataacgactgaactgaaaaatttcatagagaacttcaatagcagactcattccagcagaagaaataatcaatgatctcacagacaggtaatctgacattacctagtcagaggaacaaatagaaaaaaagaattaaaaagtgatgaaagcctatggtactcctgggacagcagcaaacaaaccaatatacacattatggacgacccagaaaaagcagaggaagagaaaagggtaaaagactatttaaaaaataacaacagaaaacttctaaatatggagaaggaaataaacatccaaagccatgaagttcaataaacctaaatagattaaaatagagatcttcacagagactacattataatcaaaatctcaaaagccaaagatgaagaaagaattatgaaaatagcaggagaaaagtaattattacataccgcagaacccacataagactactggcatatttaccagcagaaaccttgcagaagagagtatgatactatatttgaagtactaaaagaaaaaaaaaatgccaaccaagaatactatacctggcaaagctgtcctgtgaaacaaagaatagataaagagtttcccagacaaacaaaagttaatcaccactagacctactctacaagaaattctaaatggagttcttgaagttgaaatgaaagagcactcactaacaatgtaaaaatacataaaagtataaaactgactgcaaggttaagaatattcaaattctgaatagtgtaatacagtaatggtgatgcataaatcatatttaactctagaataaaagttaaaaagtattaattagttttaactaattactatacctatagtaatttgttaatggatgcacaacataaaaagacataaattgtgacactagtaacataaaatgtgagaaaaagaaaagttaaaatgtacagtgtttgcatgcaaagttgttagcttaaaatagatgctataaatataagatgttttatataagccacatggtaaccacaagaagaaaacttagatacagaaaagaaaaggaaaatggaatcaacacataccactagaaaaaataataaaatcacaaaagagaacagcaagagaaataaaggaatacaggagctacaaaacagtcagaaaacaacaaaatggcactagtaagttcatgactatcaataattactttaaatgtaaatggattaaattctctaattgaaggatatgtagtggctacattgatgggaaaaaaaacaagatccaactatgtttcacacaagagtttcaccttagctttaaagatatatatataggcacaaaagtaaagtgataaaaatatattctatgcaaatgtaaccaaaaaagaatggggtggctatatatatacaacacaaaatagatcttaagtaaaaaattgtcacaggagacaaaaaaggtcattatataatgataaagggatcaattcatcaagaggatataacaggtccaccctgtaaattataaatatatatgcatccaatattggaatacctaaatataaaaagcaaatattaatagaccgaagggaaaatacaatgatagtggaagatttaaaaactctacttttaacaatggacagattgtgcagacagaaaatcaataaggaaaaagtggacttgaacaacactatagatcaaatttacctaatagatatatacagaacattccaccaacagcagcagaactcattcttttcaagcacatatggaacaatcttcaagatatattatatattaggccacaaaatgcatcgtaacaaatttgtgaagatggaaatcatatcaagtatcttttccaatcacagtggtatgaaaccagaaatcaacaataaggggaaatttacaaatatgtggaacttaaacacactcctgaacaactaatgggtgcaataagaaatcaaaaaatattttgagaaaaacaaaaatgaaaacacaacataccaaaacttatggaatacatcaaaagcagttctatataggtatgttgcatgatgctgaggtttggggtacagatcccatcatcctggtagtgagcatagtacccagtatgtagtttatcaactcatatccctttctctctctcccctgtctagtaagtcctcagtgtctattggtcttatgtttccatacatgtgtgcttaatgtttatctctcacttgtaagtgaaaacaagctgcatttggttttctgtccctgcattaatttgcttaagatgatggcctccagttgcatccatgctgttgcaaaggacatgatttcatccctttttatggctgcatagtattcaatggtgtatatataccacattttctttatccaatccaccatagatcaacatcacgcaatatacccatgtaacaaacctgcacatgtacccatggtatttaaaatgaaagttgaaattaaaaaaagaaagtcccaactgatataataagacaaataaataacgtctctgatgagagccgaatacttgttgggatgccctggctgtggaaaggagctgcccaccgtgggtctcctctaagctgttctattgcccaataaatctcttcatcttgctcaccctccatgtgtctgcgtaccacattcttgcaggacaagaacttaggacctgccaaatggtgaggctaaaagagctgtaacacaaacagggctgaaacatgcccctttcttgtcacattgtgggagaagagaaggagagaagagctgcagcccttcagagaacccagacgagccagggctgtgactccctttttggggcccagcagttcctggcatctccaagcttccaggtgctaccgtattccctgacgccagccatggaagctgcttgcagtgaacttggtacagccgcagcctcacagagagtcggtacccatgctggcacttgagccaccaacccccctgcagcagccatcgaatctgactgtgtgcagtggccagaccccatgctcactcacacacccctcaccactccacgcctgacgcgcctttggcaggtgtgggatccaggccggtagtgtgagccaagtgcagcctgccaggctgggtgggcagagtgagcccagcgtacctgagcagaccttgggcaaaggcaccactggccacagaggtttccagtcagaaaagcgacaccccaaggatcctgtaacaatagtatcaaaaagagtaaatatatgtaggaataaatttaaccaagaaggtgaacagtctatacactgaaatctataaaggaatctaaacattcgaactcataaaagcagacagtagaatggtgtttactgggggaaaaaggatgaggaaaatatgaagatgtggtcaagaaagattgtagagtttcagtcatatgagatgaataagttttagaggtctaatgtatagcatggttactacatattttcaggcattgtatacttgaaatttaaccaaagagagtagatcttaaatgttctcaccatacatacaaaatggaatttatgtgaggatatagatatattaattagcttgattgtggtaatcattttgtagtgtgcacatatatcaaaacattacattgtacaccttaaatacatacaacttttcagtgttaaattatacttcaacaggctgggtatggtggtttacacctgcaatcccagcactttgggaggctgaggcaggtggattgcttgagcccaggaattcaagaccagcctgggcaacatggtaaaaccccatctctacaaatatacaaaaaatagctaggtgtagtggcatgtgcctgtagccccagcttctgaggcggctgagatggaaggatcacttgagcccaggagatgaaggctgcagcaagccgagtttgcaccattgtactccagcctgggcaacagagccagaccctgtctcaaaaaaaaaaaaaaaagatttaaaaaaaagaaagggaaaaaagaaaaacaaactcaataaagcttgaaaataaaacttttaagatttttaaagttaaaaatttaaatgatcaaatgtctttatataagaaaaacagagttctttttataaggaaacactatgcttttatttctcagctgctttgatgtctgtattcaaaagtctctgaagtcataatacattcttaaaaagccaatgttgcattgtgtggttgtcacccctacacaacccccattccaagagcaaggagttagttagttcaagcctttcgggctcactgtaggaaacataatagggcttaccagggaacttctgagattctgatagaataaaaggtaaatagaactatacccatgtttgagagatcaaaccttcccatcttttggttgccagtttacacacacacacacacacacacacacacacacaccaccagtaagaataaaatggtaataaaaatgaaaataagagactttttttttattgagacaggatctcactctgtcacccgggctggagtgcggtggtgcaatctcagctcactgcagtctccatctcctgggcttaagtgatcctcctacctcagcctcccaagtagctgggattacaggcatgcacccccatgcctggctaatttttgtatttttgtagagatagggtttcaccatgttgcccaggctggtcttgaactcctggactcaagcaattcacccacttcggcctctcagtgtgccgggattataggcatgagccaccactcctggctgcaattagaggacttctgatgcagatgcaatggcaaagacttattccccccacacatacactaaatacatgtaccctaaaacttaaagtataataataataaaataaaataaaaaagaatgaataaaacattttaaaaaggaaaaaaaaaacaagtataattcctggaaatgaagatgaagctaaagacagccaaaggagaactcttaaaggtagtaagaggaaggcaaactggtctagggcctctgcattgaaagaagagcacagcaacaggacatcttactataccccatcaccatgacccgaccaaagaaagcaccctaggcctgctgtttcttgacctctgacctagcaaccaagggcagcccagacaggctgaattattttccaggatggaatgggagttcctgtgataacatcaggagagcctggcaccactggtgaggagaatggatgggaagccccattaataagcagcagccatggaagtatcctccttccccaatgcttggtccctgtcataaattgtcggacccaggaatcccctttatccctgctggcctgagcctcccattcttaactaagggccaccgaggtggcccagcccagagaaattctgtctgcccccttagacagcaccagtagggactagtgggagacccaatggcaccagataaatcagatagaccaaaacaacattgcaaagactaaaaattaaactctcattgaaactacagcctgcaaaggtaggccacattttgcatgctaatctaaacagagtgatcacctgctaaagtaggatatttaaataggacccagagtgtcctaacataatagataaaatgtatggaatacaatagataataactcatcataccaagaatcaggaaaatcacaacttgaatgagaaaagataatcaactgatgtaaacataagttgaatcagatgttggcacaacgtgatgggaattttaaagcagcaatcataaaaatgcttcaacaaataattacaaattcttttgaagtaaattttaaaatagcatataacaacacataataagaatcataaaaaagaatcaaatgcaagttgtagaaccataaaactataataacagaaaaaaaattcagtgagtgagctaaatagtatagtggagataatggaggatagaatcagtgaattgagggcagatgaaagagtttacccaatatgaacaaccaagaaagtagactgaggaaaagaataaatagaacttcagaaacttgtgggacaataacaagaaagtcaatgtttatatcattagacatccagaaggaagagagaaagagaatagggctgagagaataattgaaggaataatagctttggtacctccttcctacatttccaagaaataattgatttacaaatagtctagactccttaactccaagcagtagagagacacaactggattggtttctttttctggttcctcactaactcagagtataatgttgatcaagtcattttatcactatggctcatgaggcttctatttcttcatttgtaaaataaggcagcaggtaatggagacaatatccagggttacttctagccctcgaattgatggtatttatgttatttttcaattgttttcagatacatggagggtataaacctctgaattctccctgttcagttcttggcttccctttggttgtagactaaaagctataatacattagacctgtaggacccaggctatgaaggagtttcagcctctctccatccatgctgagccccctaattctcatgtaaacacatttcatttcaattttattgctcagggcatgtcttctacaatattctatgtcatctagaccatttcaaatcaacacctacaaacatcttgacacttacaatcagcactaaagcatcaccctaacttccttgatgtgtggggagtcaaaaattgccaggtgctcactggggagtttcataaatgtaatgtcagaactctctcctatattagatttgctagaaggtggtagaaaattacttaatctctctctgctccattttactaatttacatactgaagaataggaaaacatttaggaagcattttgaagtccttagataaatgaaaatgcacttggcactaaaaactatcattatcccatttgtgaaggcctttatctccctgtctgtaagagagtttctgcctgcactgaattccagcatgtctacaagctgccagtgccctgcattaagtattttctgtcatctgtgcttgccagagattagtttgcagacattttgcaaaaagcatgcataatacatactgctgaatacaatatttatcatagaacagctccagtgattgaaaagcattacccgacagcatcctgtattgcatgattgccctttccatcaatgcaccctaaggaggcagtacaaccctaaccactgagtcacatttagtttaattccaaagccaagcctgggagttgcctcagttttgcaaaagcattatggtgctctctgaaggtatttgtgtggcgtgggataaggaaaaggtgaggagacaaaaaatatcttattccttattttccttcatcaaaaaacatcttaccgcccatttcaatagaaagctaagcactctcttatgtccatgtgttagaattaggagaagagatatacttagtcacaaggtacactaagcagcacctcatcttcctttcctaatatacatgctcttgggataataagattttgaacaaatgactctctttatttcataagtgccatgaattctggcagggtttactttgacagctattttaacagcactgttaactctaaaatctgtcagaacaagtttgtaacccctccactaaatgacatccttgtcaagagtcaaagtagattttagtagagggaaggagatgctggaatcaaatcagtgagagaagctgaagatacctcaggtgaaagaccgagtccatagctctctcttccttcttccataggaaagacatttcaggccagtttatccacaacaaatacgtctttccttgttctgttcaacatacaacgtgatgagtatacactaaaccctttctctactttgacatcaaatcttgattttcttctttgagtttcttttaacagtcttgttcttggcaaggagcgcttaatgttcctttcctattttacccctctgttgaggccagcatgtgacagtggcaatatcatattggaaaaagatagagatttctaaatggagataataactcaaagtatatttgaaagaagcaggtattagcagagaagcaggataaatactgaggagggaatgcaagataaaagttattttttctaaaatgttagtgcaaagtaactgaaaaaaaaaggatgtgaagcttggaaaaaatacatacacacacacacacatacgtgtacatatacatatatgcatgtatatatttatacacatatatttctaaagtgttatatagcctccttgtgcccacctcccaaccataaataatatattacagaactatttctacattaggtcacaaatatctaccttatttagtttaacacctgaataacagtcaattgtaaaaatccaccattacttattttgatcacctgatctggggcatttaaactgttttcaattttcactattatagacaactctacacaaaattacctggtcttgtagaatatgtaaatgatagaagtaaaactgagatcaaaacgtaggtgcaaattgtcctccaaaaacagttacaattcccccataaaaaaggttatatgagagtgcctacttcccaacatccacgtcaacactgagctctattcactttaatttttagtcctaaaacattacattttattgttgtttcaactgatatttctttgttaataagtgcaagtaaacatcttatcccatatttgttggccaacagaatttttgtgcttgggtgtgtgttaaatatttgttcttgtttttttatcagtttttccattaggatattgttttcttagtgatttacacatttttacttactaaggatagcaaccttagttatatattatgcaaatgttttcccaatttgtcaattatttgatactatgattttgtgaggaaggctttttaaaaattctatagtaaaatctcacaatttatcctttgatggtttcttatttcgagtctttctcaactaagatcacagacaggcttgattttattcaagctggagttgcttatgttgcactgctgtccctaaactgttttgccagtgatgaattcagacagtcacatattaggtcataaacatccatttctgattattatacgtttatagtctctactagccaaggtcaattccaaacgtatagctatctttactcttgcagtagggtctgtgcaattaattattacctacattgtttttcctttacaaagattggttctaaaaagcaacacttttttcattctatatgaatgcagtcctccagcattcattaggacatgtaatgctagttgctattccaaataacctcaaaatacctgtggctttccagaattagtttattccttgttcatgttacagaacaagatatttcttccaggtggctctgcttgcagtggttactcatcgtgtggccttgccctctcagaatcctttgcttgtaggcttgtggataggggaataagacagtatgaaaagctatacaggcgttatatggccaggtctttaaatggtctttatcacttcttcccagatcccattacttagagtagtcacaagatcccacccacacagaaagaagggtaagaaatttagatttcctgcattaccaaaaaaaaaaaaagaaaaagaaacaggactaatgtgcatctagccagtctctcctttaacatactcctgactatattagactatattacctctagtgtttcgcatccatacatttgcactttatacacattttataaacatatgtgatttatgaaagaatggaactgtatgaatggaattgtctatttattttaaatatcacatgtttattccacctggaaattggttttgtttatagaagtatgtgcaatgtgaaacaggcatccacttaaatttgtttgaaaaaattatacatgtatagagtaatattttcttttactaaccaaattataaggttttatttatcatttattaacaaatgaaatacaatgctaattatatgtcaggtaatttctttcttaatactttggaaagttaagctaatttttcctcaaacaaccttatgaaatattaatcttattattttcagtgtaaagaccagaaaaattgaaggttctaaaggttaatgaattgcccaaattcatgctgttagtaaactgcatatctggatttgaacccaagcatctggctccaggaaaacttcctaaacagatccagcaacagcttgagagaacaggaaaacgatgctggttttaagtttacattagttgctaggggaaccataacaaactgggtggcttaaacaccggaaaattattgtcacaaaattctggaagttagcagccagagattggataccggcagggttggttctttccaagggttgtgaggaggaatctgctttgggcttctttccttggcttgtcttcatgttcatatggcgttctcccagcatgattctctgtgtccaaattttcccttcttataaggattccacttatagcaaattaggaccactttgggaggccgaggcgggtggatcacaaggttaggagattgagaccatcctggctaacatggtgaaaccccgtctcaattaaaaaaaaatacaaaaaattagccgggtgtggtggcgggcgcctgtagtcccagctactcaggaggctgaggcaggagaatggtgtgaacccgggaggcaaaggttgcagtgagccgaaatcacaccactgcactccagcctgggcgacagagtaagactctgtctcaggaaaaaaaaaaaatagcaaatagggcaaatgcccacttaattatcttttgtcaaaatttgaaaatatcttcatgtgtctaatgcatttatcatactttatttaaaaacagccaacttgtcaaagtccttgacctaaaaataacttattaacattataggaacagcattgaatagtattaatatatatactttggggagaattaatattttatgaagtattggtcttcccatcctgaaacatctacttttcttaatttagtgaactcatatttaagcactggtggtagccaacctccaagacgatccccagtgatcctcacatcctggtatcaatgtcctcatgtattcctctcctacattttatcagggttgctctgagtaaccctcagaatacagcagaagtaacaatatgtgatttctaaggctttgtccttgctagcttttggattagtcactctggggtgaagccagtcgtcatgttgtgaggatgctccagtagccctatggagaagtccagttaatgaggaactgcagcctccactaaacagccaaggcaacttgccagccaggtaagtgagccatcttaaaatcacatattttagccccaatcaagccgttaggcaattgtgaccctacacaacatcttaactgtaacctagtaagaactcccaagccagaaacacccagctgagctttgcctaaattcctggtcctcagaaaatgtgttagatgatatataatagttacatattgaatctgctaaaatttggagtaatattttttgcagaaatagataactaatatagttcttcagtctagttttatagtttcctcataaacaccctatacatgtcttagtaaatttattctgtttttacttgcaatactcagaagatacagaaggcatctatgtctcattatttacaaaaatcactccaatataaattttatatataatattatattaattgtaatgctcaatctggaggacaagttatataatatgactcacctaggtatcatcaagatcaacagtaaagacagagaacactttcatatttcatatccgtaggagtgtccatcagtttaacccatttatgcctgaggttgcaattactgaattttgaaatcagaccttggcaattaccttgagcagtaggatataaataactcccacatgcttagagttccaatagtggaacactgggcataaataagtttaatggaagtagtcaggaggacaaataagcccaactcaaaaagaatgagtgaagtatattcattgcagcatctttcaccatccccagatcaccttcttcctgtcgctgtaggatcatgccatatagagctgcagggccatttgccaagagagtagagaaatataaacttagaaatacaagatttcccctggtaccttatccaatgttgttgtttttaacctcctcattatagtttattgatatcttaaaatatataaaccctcatttattggtgtcaaaagtttctgccaccagacccaggaacccctggcatcttggcgatcagatataatttagaactaactatatgtacttttcccaatacccataagcacatctaaaaattcctgctaggacaaccctaatcacaaaagaaattggaaacactcttatgatctgtcaaggttcagtgggagacaaaccatatcagtaatttgcgtaagaaaaatatataaagaactgttatctagtaaaatgagattgactatcaagaatgctaaagagaattctaaagatacatgaatagcaaatgtgggaaaaagtcactccctctagggctgagagtgagtactcaaggaagggacaaacttgacaagattctcctcccctgaggctgagattcagatctcactgaagaggttgtggctgtggctcattggacaggcaagaaagaagctttccaaagtgccaccagtggaagttagcaagcaggaaatgcctgcttgggtatcagtaaggcctcctgggaagcccacccactggggtggtggtgagattcactgtgaagctgctcaccagctgtcacgctataggaataaagagaaaagcctcagaatcaggaaaataaggccctttatcttgcagcataccttcagtgtactcagctgaggaaagctagcatagctccagttggctaaagagaaatgcttattgggcccagctccaacactactaagaatgacaaagaaaggtgtatttggagtaagagacaagaagcggatgactggcatacatgctaaaacaaaatgaaatgcataatgttaaggagaagtaaaagaacttttggaaaaaaaaacaaaagaaatcacagtttagctggcctcaggttctaccttatgcctgggaattcaatattgcgcatcctaattctttattataatcctcctctataagttttcttaacactaatattttcattttatggataagaaatctagcaggtcaaaggatgagcacaaaatatttcctttttcagccttcacagtctgaaattctctggctgagagagaagcaatgaagttcagagttcctaagggactataattctctgaaaataaaggctctcatgaaataccagattatttttatcacaatttctattttcctttcatctcatttcattctgccaaattaaatacatcagcatagatgcaataaaaaggggagtaataatgaatttttgacctagagggagcaaccatgagcccatccaccctcactctgcggctgctgacatgcagagaaaaacaccagcagtttttactcttgcttagagaaaacactcaggatttatattctacctgcagcatataagtctatgatcagacctgctttggggaatagattcctgcttccttctttacttctgtttgagttttcagcataataagcaatttaatcagcagctccactagaatgcttcagatatttgcatatcagcactacttgtctctctttctccttattaaaattggcatctaccatgtcactacacaggactgtagagccaagcatcctgagccaataacagcaaaatatgacttcttgctcaacagcctaaaccattacctggtctctgctgcttgtccttcagacctgtattttaccagctgtagaaaatctatactggttttcccctatccaaaacaaactcggagagagatatatttttgctattgttaatgaaacttacttaaataaaaactcttcaacaacaacaaaaatctctctcttgcatggtaaagcatttacaggccagggaaaaggttaggacatgacaaaaaaatcatagtagtgatgtgacagttggagaatttctgtgactatgtttgtacactgcattcgaaagacagtaagaaattgtgcatttcaataaattaaatagtaggttagaattaccactaaaaatcatctgcttgcagtatatttgcagaaaccaaataatcaaagggacttagttatcatgcagcaatctcccttagcaaccagcttcctgatgtatcaactcagcattactattaaaatactgaattcaaatattgactttaaaaatctcatatgtaaagtataggagagactttctctgttcataaaattcattcttttacacagctcactttgcagtgagatgtgacgtagccatatgagcaattcttaccaaaggactataagaactgatttgtatcacctgcaagacaaggcttttcagacgttcagatgcatttttaccacttcctttccccttccattaactgaatgcagaagataatattgccatgggacctgccaaatggggtagccacaatatggaaggagcctgggtccctgaatcaccatgtgagaagagtttcctatgacctagcatacataccatggcctgcttcatgagggaaaaataagcttctactgggtttgaggcaatacagattttgacaaatcttattattatgtatctatacattaccataatagaaggatcattttgatgcaaattaaaaggtttgggaatctgatctttcacttcccaaatgctattttattctagtcaagtcatctaatatttctagccctaattgtgtctgccatgagtgtagatttgctggacatgcccacagtaaacatatttaggaatatttaaagtgcatttttacagtatagccaaaaagtcattgtaccaaagaaaataaatattgcatgttttgaggcagttttaggatgcaacagtatgacacttagaattttgattacatttgggctttcgacgcatgccggcacttccccactgacatttattcaaagtcactagtgacctacacagccaccaaaatatccatcaaagcaactaaagcaacatgttccaaactataaaatctctatggcaacctgaatgaagctttgaaatttcagcattttccataacactaagcactatgtttcatgctcaacacatatttattgaattaactggtcaattaggaaaaagcattcatttctcttagattcaattggtgaatatcaccaatacttccaaatatgctctttaccttccatggataaacaagatttcatattcttgtctatatttaatgttacttaacttggttttctggttaattgccttatagctttgctagtggtaaacccaacagcttttctcaaacctcttttctttcttaattgttttttataattctgtttttgaggcttcagaacacctctttccgaaattatattttctctcagttatagccactctgtgtaacagtaacatatatcctaccattttaacttatttttctcttttggtccctgctccctcttttttttcttagagactttctgtctttgtttgccttgaagtgctataacaaaatttcattgactggtggcttacaaacaacagaaatgtatttcttaccattccaggtgctgggaagtcaaacattgaagtgccaacagatttggtgtctgtcgagcgctcacttcctagatggcagtccttttgttgtaacttcacatggttggaagaagcaacgttctcactggagcctcttttataaggggactaatcacattcaagaagattccaccctcatgacctactcacctcccaaaggctccacctcccaataccatcactttgtggattaagatttcaatatatgaattttagggaaacacaaacatttagactatagtcatttttgtgaggctgtttttttgtctctcactcttttatctctgggcttttgatgccaagatttttgtctccggtgaagtcaattttcctaagattgcaaatacctacaataattgcttaaaggatgcacatgttttcctcaccatcacatcaatttcaacacatcaatgttttctcttccttcaatctggatatctattcccctacatactttgaattagtcagtgacatcaacattctgtcagttttgcaacctttgaaaaatcatcaaattagccttcttcttcattttccacattcaatttgttgctaagtcttttcagtgttttctgcaaagtgcccttctattgctgtaatcagcatcccattccaggtgctcaatcctcaggtatgggcttgtttatcctttcccaatttactgtaactctacattcacctcctgccccccgcccatccaaaatacagtttaccaatggttctcacacctggctacacattgaaattcctggggggctttaagaacacacatagcaaggatttctcctagaaattctgattaactttgtctgcaaggggcagtctgagcattaggatttttacttctcccagataatgataatatgcagccagtattgagaactgtgtagttttcccgtttccagtctgcttattccaagggactttatatttttttgtggataaaataatcagatctgttgtttcactatgttctctaactggctcttttttgtatacaaagaaagctattgatttctgcatataatgtataagtagatatcttattgaatagttttatctctaagagatttttaatattaataatcttatcctttccagacatatataaacatatctgcattggtttcctattgctgctataataaatcatcataaacttagtattaaagcaacatacattattttgcagttttagaggtcagaagtctaaaattgatccatgaggctgcatttcttttagtggctctagggaaaattaaggttccttgtcttttccagcttttagaaaccacctacattcttttgcttgcagcttcttcctccatcttcaaagttagcagtataccatcttcccttctctcagacctccatttccatatttatatcttctctctactttacacttaaatcgtaactccactgcctccctcttacaaggacttctgtgattatattaggcctacctgggtaattcaagataatctccacatctcttgatccttaatttaatcatatatacaaaatcccctttaccatgaaaggttccggagataggacatggaaatcttaggaggtcatgatttggcctactgtatcatcttaaaataacaataaatagccttctcatgtccaattctttttttaattttattattattatactttaagttttagggtacacgtgcacaacgtgcaggtttatatatgtatatatgtgccatgttggtgtgctgcacccattaacttgtcatttagcattaggtatatctcctaatggtatccctcccccctcccccaatctcatgtccacttcttaaatcccatttctttattcttttttctctcagctttggtcagttcttcctcttcttattgtttatagtaatatcacatacaatcatgcaccacataatgccatttcagtcaatgatgggccatttaaactacagtggttccacaagattataacattgtatttttactgtaccttttgtatgtttacatatgtttagatacacaaatacccttgtgttacaattgcctacagtattcagtatagtatagatgttgtataggtttgtaatctaggagcaataggctataccagatagcctagatgtgtagtaggctatatgatctaggtttgtgtaagttaactctatgacatttgcacaacaaccaaatcacctaatgaggcatttctcagaacatatccttgtcattaagtgatacgtgactgcatttttatatatacgtataggttgttgcttctctctgaatgtaggcatccctctctggtcctgctatttggttaaaaaaaaaaagtaattgaagttagcagtgagcttataataatgttctctctcctctctcttggcagaatctctcctccattttcagaattcccacttttggagttaagattattcaagctcatggaccctctatgtaatttagtatttataaatatctgcttaacttaatcagaagaggactttttaaaaaagactgctttttctcctctcatagtttttttgtgtgtgtggcagagtcttgctctgtcacccaggctagaatgcagtggcatgaacctggctcactgcaacctccacctcccacgttcaagtgatcctcccacctcacactccctagtagctgggactacaggcacgcaccaccatgcccagctaactttctttctctttctttctttcttcctttctctttctttctttcattttttgtatttttggtagagacagggtttcaccatctttcccagtctggtctctggccttgaactcctgggctcaagtgatatgcccgcctcggtctcccaaagtgctgggaatacaggtgtgagccactgcacctggccgccccctgttcttttactctgcctcagctcggttcatgtctcttggatcagaggctaagaaaaaggaaagatggtgtgcatttctagtagtacaaaactaggtccctaaatgtgtgtttcttgcttctccttatgccatctcatgcttgatcatcttaatttctggtaaagagctctttgtttaggcttttaagacaagctcactaatgtttagaaattttcacctttctttagatttgaaaaaatatgagtctatgaaggggatcaattaattaatatatagatattcactcacgttccttcccaagcactggttgttcccttttcccatactttgaggagaacctgttgtgttttgtgtgttttttttcccctagaccaatttctaaacttctgcaaggagcaactgagaaaatgaaaatgaccagccagactaaaatgtggtacagcagagaggagataatgggagaagagaaatcagcagaggtgattttaccaagtttcacaaaggatttgttattcattcatgtagcttctcataaaatatctattttgtaccttctatatgttagacactcttccaggtaatgaggatagaacagtgaacaaaatatcaagtttccttcccaaaatttacattctagttgatggagatagtcagtcaacaagcagacaagatttacttcagcttgtaataaatcctaaagaaacagataagacactgaaatggaagtgatgagactggggcagaggaggcagtcagtgatgtcgtcttagaataagtaaaattacaactgaagcctacaagattaaagtaaatttccctttgaaaagttgaggaagggtattcagggcaggggacataaaccctgaaacaaaaaagagcttatcgtatctgaggagcagactggtatgaggaatgtctcaatgcagctggatggggaaatgatgcagaatggtgcaaggtgaggtgggtgagaaagctgggtccaggtggtgtaagcatggtaggacatggtcaaaactctaggttttactttgagtgtaataaaaggcacttaaccattttcagtgggaatatgatgtgttccaatgtatgatttttaaatatcgccatggtttcttggggtgtgaatgagaactagattatatgaaaagtaaacgtggaagtacagagatcactgaagatgttacagaaacccagacaagagagaatggtagcatgggctaaggttggagctgtggaattggaagtttgagatctttgttaggtaagcaaattaaaatgtcacataggcagatgactatagatatctggatttcaggtcagattagacatatatttgtgagtccttagcaataaattgcattttgagccatgggactggatgggatcacctagaaagagagcatacaatgaaaaccagagtacagatgtctggaaaacatcaacatttaaaaaccccgtgaatgaaggggagatagccaagcattcaaggagaacgaagtatgccaaggcagttgaacgaaaaccaggggatgtcatgaaagtcaaaatacaacaatgttttaagaagaaaacaattaaaacctttatccaatgtttctgaatggccaatacattgctatcagaggaatggacattgaatattagattttccaagctattccaagaaaagaacaatgtcagtggagccatatgtatgattaacatacagatgttcatgctccttctaattgggtaggcaaaagagtgagtagaggtttaaaaaaagaagaagaaaaagggagacagtgagtgtagacaactctttccacaatattttttgggaagagggtcaagaaatatggcatggttagacagagtatgtgggatcaaaggcatgttaagatgttggcactaacttgttcatatactgactagattgatcccattagatggggatacatgatgcaggaaggagaggaattaactataggacaaaagtcttttaagaagatggagggattagagaaattcagagtgcaaataaaggagctggacttttctgagagaagaaagtttctgaattatttttaaattgtttctggctgctagactgatacacaactccaaggctggaccatatgggtctgagcttacatttgagtcatatatcagtttttagctgctatgtccattatgggtaaatgcctttcatgattggtaaattggtagctatttttaatttttatgtgaagggaggtttctgtttatttttatttgcttattgtttcaggctgaagatggtggaggaaaaaatttgtcatccattcctaacaatgtttgcagagaagttattcactggtttcataaaactattatttagttttatgtttttctcttgaaactcagtcttaagcatccatatcatgcaccatagattatagattttaaaattctaaaaattcttcgtgtgtttgtatgtgcgtctgtgtgtgtctccctccccacttcctccctcctccaagacagcatagtttaaatgctgttggcttgaaagccagagtatgtccctccactcagtattttctccaagggtatcctaggatgatgcttaattagaaaacatagtgatttaaacatttaattattttaactagatccaaaacagaatgactgtattggtgtaatttatttttgaccaccatttccaagtttattttccaattagtagaactgggttgagatattatcgactaattaatgaaattaacttattttttcataataatattacataatcatcaatctcacttgaatacgtgttagagattttatgttagtttaatgggaggtataggatgctttatgggataatacaaaaagcccagagaactgagatagcttctgtgtatgtgcatcccttggcagattaaaaagcctgaaactggcaagtggagcaagatggcataatagaaacctaaaccatttgtccaccccgctgcagtaacaccaaattttaacaaccatctgcacacagaaaagcaccatcacatgaaccaaaaaatcaggtgaacaatcacagtacctggttttagcttcatatcactgaaagaggtattaaagagggtaggagagacaggcttgaatcactggtgccacccctccctgaggccaagccctacctagttcatggatgacatttctaggcacaccctgggccaaaagggaactgctggcatgaagggaaagacccagtcctggcaggattcatcagctgctaactaaagagcccttgggctctaaataacaagcagcaatacctaggtagtacactgtgggccttgggctctgagacatgctgacttcatgtgtgacccagcaaattctcagctgtgaaggctatagtgaaagactccttttatttgagaaaagcagagggaaaagtaaaggagactttgtcttgcaccttaggtaccagctcagctatagcgaggcagagcaacaaacaggctcttggtgtcccgagactaggtctaggctcttgaacagcatttccgaacctgccctgggccagaggggagcccagtgccctaaaaggtgagttccaggcctggcagaattcatgacaagctgactgaagagcacttgggctttaagtgaacatcagctgttcacttgtagtggcctggcagagcccccatgagctggtggtggtgctgcagggagaggctcctctgcctgtggaaagaggtaggaagagcaggaaggagtttgtcttgtggtttgcgtgccagcttagctgcagcagaatagaacattaggtaaatttccaagattttttactctaacccttcgattcaacacagcaactcttgacttgcctggggcctaggggaactcgccaccttgaagggaaggacaccaacctggctggttttgctacctgctgatcatagagccctagagccctgagtgaacatgggtggtagctaggtagtggttcaagtcgggtgggagagacccagtgctgtgttggcttcaggtctgacccagcacagtcccaatagtagtgaccacaggggtgtttgcattaccatattcccagttccaagcagctcagcacagagtgagagattccatttgtttgggagaaagtaagggaagagaacaagagtctccgcctggtaatccagagaattcttctgaatcttatccaagaccaccaaggcagtacctttatgagtctgcaagaaccacagcattattgggctttggacctacatccctttgcatatctggaaatccttcccaagaaggacaagcacaaacaagcccaaacttcaaagactacaataaatacctcatttatcaatgcccagacaaaaactaacatctacaagcatcaagacaatacaggaaaatggcctcaccaaatgaactaaataaggcaccagagattgatcttggaaaaatgaagatatgttacctttcagagaattcaaaatagctgttttgatgatatttaaagatattcaagataacacagtgaaggaattcagaattctatcaaataaatttaataaagagattgaaagaattaaaaagaatcaagcagaaatcttgagttgaaaaattcaattgacctactgaagaatgcatcagagcctctaaatagcacaattgatcaagcaaaagaaaacattagtaagcttgaagacaggctatttgaaaatacacagtcagaggagacaaaagaaaaaaagaattaaaaataatgaagcacacctacaagatctagaaaataaccttaaaggggaaaatctaagagttattggctttaaagaggaggtggagaaagagataagggtagaaagcttattcaaagagataatatcagagaacttctcaaatgtagagaaagatgtcaatattcaagtacaagaaggttatggaacaccaagcagatttaacccaaagaggactacctcaaggcatttgataatcaaactcccaaaggtcaaagataaagaaagaatcctaaaaaatagcaagagaaaaaaaaataacatacaataaaggtcgaatacatctggcagcggacttttcaatggaaaccttacaggccaggagagagtggcatgacatatttagactgctgaaaggaaaaatcttacccaagaataacatctccagtgaaaatatccttcaaacacaaaggagaaataaagactttcccagataaacaaaagctgagggatttcatcaacacagacctgccctgccagaatgctaataggagttcttaaatcagaaagaaaagaatgttaatgagcaataagaaattatctaaaggtgcaaaatttactggtaatactagtaagcacacagaaaaacacaaaatattataacactgtaattgtatttgtagtgggtaaacttctcttaagtagaaagaagaaatgaagaagcaataaaaaataataactaccacaacttttcaagacataatataataaaacataaagacaaacaacaaaaagttaaaaaacagaggaacaaagttataatgtaggttattattagggtttttttgcatgtttgtttatgcagtgttttcatcagtttaaaataatgggttataagaatatttgcaagcctcatagtaacctcaaattgaaaaacatataacaaatacataaaaaataaaaagcaggaaattaaatcatactaccagagaaagtctccctcacttaaaggagaataggatgaaaggaaagaaggaagaaaagaccacaaaataccagaaagcaaattaaaaattggcaagagtaagtccttatttatctttaacactgaatgtgaatggactaactctcaaataaaaagacacagagtggctgaataattttttttttaaaaaggacccattggatctgctgcctacaaaaaaaaacacacttcacctgtaaagatacacagactgaaaataaagagatggaaaaacatatttcatgcaaatgaaaactaaaagcaggagtagctatacttatatcagacataataaatttcaagagagaaaccataagaagagataaagaaggtcattatataatgataaaggggtcagtttagcaagaggatataacaattataaatatacatgtactcaatgctgaagcacctagatatagaaagcaagtatttgagataaagagagaaatatgcctcagtacaataatggctacagacttcaacaccccacttttcagcatcaaacagatcttccagatggtaaattatcaaagaaatatcggacctatactgcactgtacaccaaatggacctaatggatttttacagaacatttcatccaacacctgcagaaaacacattctcctcagcacatgtaccattctcaaggagagaccatatgttaggtcacaaaacaagtcttaaaacattccaaaaaaatttaaataatatcaagcattttctctgaccacaattgaatgaaactagaaattagtaacaagagaaagttttgaagctatataaacacacagaaattaaacagtgtgctcccaaataaccagtaggtcaataaaaaaattaagaaggaaattgaaaaatgtcttgaaacaaatgaaaatgggaacacaacataccaaaacctatgggatacagtgaaagtattactaagaaggaaatgtattgttataagcacctacatcacaaaagaagagaaacttcaaataaataacataatgatgcatcttaaagaactagaaaagcaagagctggccaaacccaaaattaatagaaggaaacaaataataaagatcagagcagaaataaatgaaattaaaatgaagaaaacaatagagaaatcaatgaaatgcaaatttggtgttttgaaaagatataaaaaattggcaaagctatcaccagactaagaaaaaaatgagagcaagatggccaaataggaatagctccagtctgcagcccccagcgtgattgacacagaagatgggtgatttctgcatttccaactgaggtacctggttcatctcaatgagactggttggagagtgggtgcagcccacagagggtaagccaaagcagggcagggcattgcctcacccgggaagctcaagtggtcaggggatttccctttcctagccaagggaagccatgacagacagtacctggaaaaatgggacactcctgcccaaatactgcacttttccaatggccttagcaaacagcacaccaggagattatatcctgcacctggcttggtgggtcccacgcccacggagccttgctcactgctagtgcagcagtctgagattgacctgtgagggagcagcctggcagggggcggggcattcgccattgctaaagcttgagtaggtaaacaaagcagccggggaagctcgaactgggcagagcccaccacagctcagccagtcctgctgcttctgtagactccacctcttggggcagggcatagctgaacaaaatgcagcagaaacttctgcagactaaaatatccctttctgacagctctgaagagagcagtagtttgcccagcatggtgtttgagattggagaatggacagactgcctcctcaagtgggtccctgacccccatgtagcctaaatgggagacacctcctaataggggctgactgacacctcatacaggcgagtgcccctctgggacgaagcttccagaggaaggatcaggcagcaatgtttgctgttctgcaatatttgctgttctgcagcctccactggtgatacccaggcacacagggtctggagtagacctccagtgatctccaacagacctgcagctgagggacctgagtgttagaaggaaaactaacaaacagaaaggaatagcatcaacaccaacaaaaaggacatctacaccaaaaccccatctgtaggtcaccaacatcaaggaccaaaggtagataaaaccaaaaagatggggagaaaccagagcagaaaagcggaaaattctaaaaaccagagcacctcttctcctccaaaggattgcaactcctcgccagcaacagaacaaaggtggatggagaatgactttgatgagctgacagaagtaggcttcagaaggtcagtaataacaaacttctctgagctaaaggaggatgttcgaacccattgcaaggaagctaaaaaccttaaaaaaagattagagtagtagctaactagaataaacagtgtagagaaaatcttaaatgacataatggagctgaaaaccttggcacgagaactatgtgacgcatgcacaagcttcactagctgattcgatcaagtggaagaaagggtatcagtgattgaagatcaaatcaatgaaataaaatgagaagagaagtttagagaaaaaagagtgaaaagaaacaaacaaagcctccaagaaatatgggattatgtgaaaagaccaaatctatgtctgattggtgtacctgaaagtgacggggagaatggagccaagttggaaaacattcttcaggatactatccgggagaacttccccaacctagcaaggcagaccaacctcaaattcaggaaatacagagaatgccacaaagatacacttcgataaagcaaccccaagacacataattgtcagattcaccaaggttgaaatgaaggaaaaaacgtttaggacaaccagagagaaaggtcaggttacccacaaagggaagcccatcagagtaacagcagatcccttggcagaaactctacaagccagaagagagtgggggccaatattcaacattcttaaagaaaagaattttcaacccagaatttcatatccagcgaaactaagcttcataagtgaaggagaaataaaatcctttacagacaagcaaatgctgagagattttgtcaccaccaggcctgccttacaagagctcctgaaggaagcactaaacatggaaaggcacaaccagtaccagccactgcaaaaaaacatgccacattgtaaagaccgttgatgctaggaagaaactgcatcaactaacaggcaaaataaccagctaacatcataatgacaggatcaaattcacacataacaatgttaaccttaaatttaaatgggctaaatgccccaattaaaagacaaaaaccagcaaattggataaagggtcaagacccatcagtgtgctatattcaggagacccatctcacgtgcagagacacacataggcacaaaataaagggatggaggaagatctaccaagcaaatggaaagcaaaaaaaaggaggggttgcaatcctagtctctgataaaacagactttaaaccaacaaagatcaaaagagacaaagaaggccattacataatggtaaagggatcaattcaacaagaagagctaactatcctaaatatatatgcacccaatacaggagaacccaaattcataaagcaagtccttagagacctacaaagagacttagactcccacacaataataatgggagactttaacaccccactgtcaatattagacagatcaatgagacagaaggttaacaaggatatccaggacttgaactcagctctgcaccaagcagacctaatagacatctacagaactctccaccccaaatcaacagaatatacattcttctcagcactacattgcacttattctaaaattgaccacataattgtaagtaaagcactcctcagcaaatgtaaaagaacagaaagcacaataaactgtctcttagaccacactgcaatcaaattagaatttgggattaagaaactcactcaaagccacacaactacatggaaactgaacaacctgctcctgaatgactactgggtaaataacaaaatgaaggcaaaaataaagatgttctttgaaaccaatgagaacaaagacacaatgtaccagaatctctggaacacatttaaagcagtgtgtagagggaaatttatagcactaaatgcccacaagagaaagcaggaaagatctaaaatcgacactgtaacatcgcaattaaaagaactagagaagcaagaacaaacaaattcaaaagctagcagaaggcaagagataactaagatcagaacagaactgaaggagacagagacacaaaaaccccttaaaaaatcaatgaatccaggagctgggtttttgaaaagatcaacaaaatttatagaccactagcaagactaataaagaagaaaagagagaagaatcaaattgatgcaataaaaaatgatacaggggatatcaccactgaccccacagaaatacaaactaccatcagataatactataaacacctctacacaaataaactagaaaatctagaagaaatggataaattcctggacacatacaccctcccaagactaaacaaggaagacgttgaatctctgaatagacaaaaaacaggctctgaaattgaggcaataactaatagcctatcaaacaaaaaaagttcaggaccagatggattcatagcctaattccaccagaggtataaagaggagctgttaccattctttctgaaactattccagtcagtagaaaaagagggaatcctccctaactcattttatgaggccggcatcaccctgatacaaaagcctggcagagacacaaaaaagaaagagaattttagaccaatatggctgacgaacatcgatgcaaaaattctcaataaaatactggcaaaccaaatccagcagcacatcaaaaagcttatctaccatgatcaagtcagcttcatccctgggatgcagggctggttcaacatacccaaatcagtaaacatagtccatcacataaacagaaccaatgaaaaaaaccacatgattatattaatagttgcagaaaaggcctttgacaaaattcaacagcccttcatgctaaaaactctcaacaaactacgtattgatggaatgtacgtcaaaataataacagctatttatgacaaacccacagccaatatcatcctgaatgggcaaaaactggaaagattccctttgaaaactggcacaagacagggacaccctctctcaccactcctattcaacatagtgtcggaagttctggccagggcaatcaggcaagagaaagaaataaagggtattcaattaggaaaagaggaagtcagactgcccctttttggagatgacatgattatacgtctagaaaaccccatcatctcagcccaaaaatctccttaagctgataagcaacttcagtaaagtctcaggatataaaatcaatgtgcaaaaatcataagcattcctatacaccaataacagacaaacagagtcaaattatgagtgaactcccattcacaattgctacaaagagaataaaatacctaggaatccaacttatgagggatgtgaacgacctcttcaaggagaactacaaaccactgctcaacgaaataaaagaggacacaaacaaatggaggaacattctatgctcacggttaggaggaatcaatatcgtgaaaatggccatactgcccaaggtaatttatagagtcaatgccaccccatcaagctactaatgactttcttcacagaattggaaaaaaactactttaaagtttatctggaaccaaaaaagagcccgcattgccaagacactcctaagcaaaaagaacaaagctggaagcatcatgctacctgacttcaaactatactacaaggctacagtaatcaaaacagcatgttactggtaccaaaacagatatatcaaccaatggaacagaatggaggcctcagaaataacaccacatatctacaaccatctgatctttgacaaacctgacaaaaacaagaaatggggaaaggattccctatttaataaatggtactggggaaactggctagccatgtgtagaaagctgaaactggatcccttccttacacctcatataaaaattaattcaagatggattaaagacttaaatattagacctaaaaccataaaaaccttagaagaaaacctaggcaataccattcaggacataggcatgggcaaggacttcatgactaaaacaccaaaatcaatggcagcaaaagccaaaattgataaatgggatctaattaaactaaagagcttcggcacagcaaaagaatctaccatcagagtgaacaggctacctacagaatgggagaaaatttttgcaatctactcatctgacaaagggctaatatccagaatctacaatgaattcaaacaaatttacgagaaaaaaatcaaacaaccccatcaaaaagtgggcaaaggatatgaacagacacttctcaaaagaagacatttatgcagctgaaagacacatgaaaaaatgctcatcatcactggtcatcagagaaatgcaaatcaaaaccacaataagataccgtctcacaccagttagattggcaatcattaaaaagtcaggaaacaacagatgctggtgaggatgtgaagaaataggaaggcttttacacagttggtgggagtgtaaactagttcaaccattgcagaagacagtgtggcgattcctcaaggatctagaactagaaataccattgatcccattactgggtacgtacccaaaggattataaatcatgctactataaagacacatgcacatgtatgtttattgcggcactattcacaatagcaaagacttggaaccaacccaaatgtccatcaatgatagactggattaagaaaatgtggcacatatatatcatagaattctatgtggccataaaaaatgatgagttcatgtcctttgcaagggcatgtatgaagctggaaaaccatcattctgagcaaactatcacaaggacagaaaaccaaacatttcatgttctcactcataggcgggaattgaacaatgagaacacttggacacagggtggggaacatcacaccccagggcctgtcatggggtggggagcagagggagggatatcattaggagaaacagctaatgtaaatgacaagttaatgggtgcagcaaaccaacatggcacatgtatacctacataacaaaccagcacgttgtgcacatgtaccctagaacttaaagtacaataaaaaaaaaagaaaagaaaaaatgagagaagattcaaataaataaaatcagagatgtaaaggagacattataattgttaccacagaaattcaaaggatcattattggccactaagagcaaatatatgccaataaattggaaaatccagagaaaatggattctagacatataatgcctatcaagattgaaccatgaagaaattcaaacactgaacagaccaataacaagtaactagatcaaagccacaataatggacacaggaaggggaacatcacacaccagggcctgttgtggggtggggggaggggggagggatagcatttggagatatacctaatgttaaatgacaagttactgggtgcagcacaccaacatggcacatgtatacatatgtaactaacctgcacgttgtgcacatgtaccctaaaacttaaagtataataaaaaaaaaattctagtaaagaaaagcccaggacacaacggttttcactactgaattctaccaaacgtttaaagaagatctaataccaatcctattcaaactggtctgaaaaacaacgtaagagggaatacttccaaacttattctacaaggccagtattaccctgataccaaaaccggacaatgacacataaaaaaaagaatgaaaactacatgccaatatctctgatgaatattgaagcaaaaaccctcaacaaaatactagcaagccaaattcaacaatacatttaaaagataattcatcatgaccaattagggtttatcccagggatgcaagtataattcagtatatgcaaatcaatcaatgtgatacatcattcaacagaaggacaaaaaccatgtgataattttaattgatgctgaaaaagtattcaataaaattcaaaaatctttcataataaaaaccctcaaaaaactcggtatataagaaacatacctcaatacaataaaagctacatatgacagactcacagctggcatcataataaatgggggggaaactgaaagcctttcttctgagatcttaaaagagacagggatgtcctcgccactgttattcaacatactactagaagttctagcatgagcaattagacaagagaaagaaatgtagggcatccaaactggaaaggaagaagtcaaattactcttgtttgcagatgttatgatcttatatttggaaaagcaccaaaaactattaaaacagataaataaatctggtaaagttgcaggatacaaaatcaacctacaaaaattagtagtgtttctgtatgtcaacagtgaacaatctgaaaaataaatccaaaaagtatcccacttacaatagccacaaataatattaaatgcctaggaattaatttaacctaagaagtgaaagttctctacaatgaatactataaaatactgataaaagaaattgaagaggacatgaaaaaaatggaaaaatattctatgttcatggattggaagaataaatattgttaaaatgtccatactatccaaggcgatctatagattcaatgcaatctttatcaaaataccaacagcattcttcacataaatagaaaaaaaatcataaaatacatatgggaccaccaatgatccagaatacccaaagctgtcctgagcaaaaagaacaaaactggaggaatcacattacctggcttcaaattatgctatagagttatagtaaacaaaacagcatggtattggcatacaaagagacatataaagccggacacagcagttcatgcctgtaatccgaccactttgggaggccaaggtgggtggatcacttgaggtcaggagttcaacaccaacctggccaacatggtgaaaccccatctgtactaaaaatacaaaaattagccaggcttagtggtgcttgcctgtaatctcatctacttgggaggctgaggcaggacaatcacttaaatccaggaggcagaggttgccgtgagccgagattgtgccactgcactccagcctgagcaataaagcaagactcaatctaaaaaaaacaaaaacgaaacaaacaaacaaaaaaaacataaaccaatggaacagaataaggaacatagaaacaaatccacacacttatagtgaacttattttcaaccaagatgccaagaacatacattgggggaaagacaatctcttcaataaatggtgctgggaaaactggatatccatatgcagaaggataaaactaaacccctattactcaccacatacaaaatcaaataaaatgcatgaaatacttatatctaagacctcaaactatgaaataactgaaagaaaacattgaggagactctctaggacattggagtgggcaaagatttcttgagtaatatctgacaagcacaggcaaccaaagcatcaatggacaaatgggatcatctcaagttaaaaggtttttacacagcaaaagaaacaatgaacaaactgaagagacaactcacagaatgggagaaaatatttgcaaactatccacctggcaaggaactaaaaaccagaatataaaaggagctcaacaacctataaggaaaattctaataatctgattttaaaatgaacaaaatatatcaatagacatttctcaaaagaagacatacaaatggcaaacaggcatatgaaaaggtaatcaacatcattcattgatcaccagaggaatgcaaatcaaactacagtaagatatcatctcacctcagttaaaatggcttttatgctaaagacaggcaataacaaatgctgacaaggatttggagaaaaaggaacactcccaatgttgggaatataaattggtacaaccactatggagaacaagtttgaagttcctcaaaaaactaaaaatagagctgccacatgatccagcaatcccactgctgggtatgtacccaaaagaaaagaaatcagtatgttaaagaaagatttgcactcttatgtttactgcagcactgttcacaatagccaagatttggaagcaacctaaatgttcatcaacagataaatggataaagaaaatgtggtacatatacacaatttagtactattcagccataaaagagtgagatcttgttatttgcaacaatatggatggaactagaggttctcatgttaagtggaataagtgaggcacaggaaaaaaaacatcatatgttcttacctatttgtgggatctaaaaatcaaaacaatcgaactcacggacttagaaagtaaaaggacagttaccagaggctgggaaaggtagtggggtccaggggaaggtggggatggttaatgggtataaaaaatagaaagaataaataagacctattatttgataacacaacaatgtgactacagtcaatactaatttaattgtacatttaaacataactaaaagagtataattggattgtttgtaacacaaaggatgaacactttgatgtcatggataccccattttccatgatgaaattattatgcgttgcatgcctgtatcaaaatatttcatgttccccataaatatatacacctactgtgtacctacaaaaataaaaaataaaattttatttaaaacctgaaacggaagactgtacaaatggactcaattttttcttagaagtattccttaaaagcaaagggacatctgattactcttatagcatttatccaacttcaatcttggaatataggagaaatagcaataaatgcaaaattattaaacctgagttataacctagctctgtctcctaagagctttgaaccatggacaaatcatcaattctcaactacctctaagcctcaacaagttattgtgggaattaagtgagaaaatgtttgtcaaagcattttaaaatataacacaatataaaaagataatgtctgttgcatttatcatcatcatcatcatttttgtccttgagctcaagccatcaattatgatcattaaaaattgtctgatataatacttatgtatttatttatatgaatccatatagcaagcaagttgatagtaagttaataccagatctgattttacttttattctcccccacatgcacattttcataaatattgttgaaatgtttattaaatgttttataagtttgttcccgcattttaaacatgcttcctaaaagctcagccctcatttttaaagtagctcacaatttttgagctcttacttggggctagaaactgtcctgggcattttaaatacaaaaccttatttaatcctctcaagaactccataagggtaaggtactgtggtgatctttactttgataatgagacttccctaaggtagacaatttcccattctgcaaagactgtgtttctcttaaaatattggaaagacagataaatcagctgtggtcctctcctggggaatgtgtttgtcatgagaggggattcgtattgcaatatcttcagcatcagttacagtttacattggaaacttcaacttacttgcctagcatattttgtgacattttcactaacctcctaatggaaaaaaaaagctgagccatcaactgtcaattttggataattttaaagatgacaggataatttttcatctacctcattccaaaagcagtatgatgtagctatacggtgacaccaacacatgccttagagaacatgctccatctgagcagagtttatatcacccacaaggactaaggcaatgttaaaaatatagactttcagtaaatgcttgctgaactgaaatggttccaaattgttaaattaaaagagataatagcagaaaagtcaaagcagcaaatgatgagcaggttatcagagaaataaagaaagcagaagataaattgccctccatcccagagctagcaagtgcactaaacttactactgtggaatgtgtttaatgatagataattgagttgtttcattactcaccaagagaagagaaagatgaaaccgtactcagaataattttgaataaaaagcccctttgttttatcaaaccacattatgttctgttaagtggcaaagttgaatgaaaataccttcaagttgtaaaacactcatcaaatataagacattaataaaatagttgtataacatcggatctctcaactttattcaaccatttcttcccttagatgatgagactgtctgtaagtaagtaggatgagtaggaaaagctaagattttaactcaaccacgaagtttacttttttctccttttgcagaatagcaccatatatttctttttaaattttttttatttttaatttttgtgggtacctggtatgtgtatataaggtacattcgatgttttgaaaaaggcatgtaatgtgaaatactcacagcatagaaaatgggatatccattgcctcaagcatttatcctttgatttacaaataattcaattaaactattttagttatttttaagtgtacaattaagctgttactgattatagtcaccctgttgtgccatcaaatactaggtcttattctttctaactgttttttgtacccattaaccatccctacctccacatcagctccctaccacccttttagcctctagtaaccatccttctactctctatttctatgagttcaattgttttgatttttatatcttacaagtaagtgagaacatgtgatgtttgtctttcggtgtatggcttatttcacttaacgtgatgacctccagttccacccatgtcattgcaaatgacagtatctcattcttttttacggctgaatagtactccattgtgtatttataccacattttctttatccagtcttctgttgatggatgctcaggttgcttccaagtcttagttattgtgaatagtgctgcaacaacaaacataggagtgcagatatctctttaatatacggatttcctttcttttgagtatatacccagcagtgggattgctggattatatggtagctcttttagttttaggatttttttgtttttgcttttgttttttttaggaacctcgaaactgtcctccatagtggttgtactaatttacattctcatcaacagtttacaagggttcttttttctccacatccttgccagtatttgttattgcctgtcttttggattaaaagccattttaactggagtgagatgatatctcactgtagttttgatttacatttctctaatgagtaatgatattgatcacctttttatatgcctgcttgctatttctgtgtcttcttttgataaatgtctattcaaatctagaccaccaagtttaaatgatagctctgctactctgaccctaagcaacttacttctctctggagtagttctcaaatgtgaagtggataagaatcacctgagatacttaaatgtgtattttcaggtgccaacaacagagattcttggttagggggaatctctggaatctgacttttttggtggaaatctagtttttcataggcaccccaaaatattctaatgaaggtggtccaggtctcccacttaaataaatagtattccaggaatcttatttcccttatctttcagaagcatataacaatacccacaggatcaggggaagttttttagtggggtgggaggtaaatgaactaacatattttaccaacagttttgaacatctactgtattggtctgctagggaaaccataacaaaataccacagactatgtgtctctaccaacagaattttattttctcaccattctgaaggctagaagtccaaaatcaatgtgttaccaggattggtttctggtgagacctctcatcctcgcttgtagataaccacctgctggctgtgtcctcacatggcttttcctttctgcatatgtggagagagatagacaccatctctaatgtctcttcctcttcttgcaggggacaatttctgtcaaattaggactccatcctatggcctcctttaacctccctaagggccttatctcgaataatgtcacattgggtgttaagcttcaccatgtaaattttggggggcacaatgcagttcataatacctgttatgtggaaatacatgttttagataaaatgaggaatatggataaatgagatttggaccttgctcttaagacatgtacattccaataaggacatataaattgcaattatcttccaatccacattactataacttcgactgctctgtttatgtcacatcatttcccacttataatatccagatagttgatcaatgaactgggaatatcttgtccttaggttgtctatgatatttttctcattgagaatatgaatcaaaacatagaaggtgtggtttggagctgactcataacaactgtagaaaactagaaggaagatccataaactccagctgctgaggttctcagagtttcacttttgaagcctcatcatccaacctttccttaaattccatgacaatcatattgaaatataagtaggtttttccttattgagctaagtacatgctgagataatcatacaattaggaagaatgtgaaaagtataagaatataggtattatggaggttttgagaaaaacaattttttcactagaatgctcagtgagatatctgacttgagaaatagagactatgaatgattttggtatctgatgaaggaactacagaatttttggtaaataaatgaacaggagcattatcttccattggatttgggaaaattacttaatttttatgttaaggaagggaatctgaaatacagagaagctacataacacagtcggatatggattcaaaccagacccttagtggcctgactcttaatcactgtactcatttgtctccaagggtaccactacttctactcctacaaagtcaaatgctaaactatgtgctacatactgaggctatcacagaacatctcaggggaagcaaaccaattagatctaaaataatcagagcttttagggaggagttgaaaccaaggctgggcctcaagtggtataggatatttaggaaaaaggagaagaatagtgaaaacaatacacatttcatgccaaggtcagctaatataggagttgagttcctgagagtcagaaactttttaaaatgtacttaaatttaatatggatgcaataatgtcatctaatacacaattcgtattcaaatttccacgaaatgtcctttacatctgttttttttctagtctagaatccaatcaaaatgcaacattacaattgtctgtgtctctccatttccctttaaaccagatgaatcttctttaatctagaacaatccttcatgttattgacatttttaatagtctaggctacttgactattacattgtcccatattctgtatttttttcattgctcctttataattaaattcaggttaaatgtttttggcaagaatattgcaaagatgatgtataatttcctctgaatcacaatagatggcagggtttattaatttgttctgctgatggaggataagtttgactatttgattaagctggtatctgccagatcgtttcattataaaactaacttttccctgtaatttaataagcaatcagtagggggatattttaagaccatgcaagtatcttgtctcctaacaccaaggtatttgtcctctttcaccaagtaattttgacttccattgatgatccttacctgaattaattatcatatagttggtatcagaatggttttattccaacactattctttcttctacatatgttagctggtattcttctataaagcaaagcatttcaatcctcctcctcacttttcacgtcattatgggttcatgtattatcattttacacactgtatttgttcattgttttacacatcatttttcatgctcaaattgtcacaaatgtggccagtggaagactcttcaactcagctctcatgcccgcttgactcactcccagtagtttttgaacaattccttactttcaggcacccccaaatggctaggcttactttgtaccttctctgccccaggcctaaaatcacccatatctcaaaggagccctatattgggtatttaggcgcccacttttcttaatgaagccatttaaagcttttgtagtccaattttgaggcgcaatttgctggtcagccacttcattgtcttcacataatttcaatatgatattgatttgaaactcaaaccctgattgaactatgattgaggagtggttgatgttctcaaattgtcctagtgtgtgctgcaaaaggttagcaaccaaaatgtaaggtgtaaaaggtaaatttattacctgaaaagatattgagtagtttatctctctacctatatgcttctgaaatttatatcacaatatgcattacacaaatatagtgttctaagcctgttttgtttttttctccccaaatacttctactatatcctcagtcaaattgcgatcagattatcctattagcttggcacactgttttaaaccagggatcagcaaagtttttcttaaaaagccagacaataaatatattaagttgtgtcagtcatttgatctctgttgcaccattcaaatcttcagacataggacaaaattagccatcggcaatacatgaacgggcatgactatgtgtccaataaaactttatctgcaaaaacagaagttagattatagtttgtgaacctttgtcataaacaaaagtaacaacaacaaatgtgacaactattacttctatattagtactacttctataataaaatttggtggtagtcctagaatccaagatattcacttaatattttgccattattccttccagtctttatactccatgcccttttttttttttcttacatcatggtaattgttcttcatacatgtggtttttttatccagcatttttcatttaattttgtaatcaaaacatttctcacctgtagtagatactgctgtgttttttcccttccccatatcacctccaccctctctaagctcagctgcagacacactacacaatcctatacacattaacagctttccacctcgatatttgcacctctctgcctttctatcaaacactttccaggttcatgggagtgtgcttttcagggacaccctaaagcacaatagtttcaatccttctgagggcaagccccaacaaatgaggggctagaaatgggaggtaaatgatccaacttccctgtttttcaatgccatttttacaatttaccaattatattcgtattacattttctccagtttgtcgatattctcattttgtttattaatttttacacatacaagttttaaataatcatctttattaattgatttttactgctttacatcatggctttaggttgattaaaatcctctctcagaaagcaattttacatgtattcttcattttaactttagaaccagtcaagccttcaaaaagcccaaaattatagaaattttgatgagaagtgaatttaaacaaatgcatttgttgatagttataccttagtcatattcagactttccatgtattaagttaggttgacttttcatagttcattctttttttaatgacactcagaatgtttataaattttcttgatgtaaacatcaggtatttggtattaagattatttctggatttttctcctttattgcaattgtgaattaaggatttttttcatccattacattctgtaaatttatcttgtatctagctgaatgttcatattcattgtgatattatgtataagtacatttatggaattgtattctggagagatgctatcaactatatacaaggacaatatagaaaccagttcgttgaaagtcattgttgcagtgatataaatattttcagaaagccattcatgcccatctacaagcacataatattttatggcctgatttttttgtgttttaattcctggcttgactcaatgtttttagtctcttctaattataatatgctagtttcctgtattttaggtattctcataaccaccctaaataacttctgaaataagaagggcatacgtcttttaatatgatactaactctaatcatttcaggttgattcttttatattctaaatacacaaaagaaatagaattcagcttgcatcttttcaataaaaatcaaattgtaaaatatattgcatttacaaaatatattgtagaagaaaaatttattcttcctaagtggaactttgtactctctgaccagcatctttccatttccccctatccttgcccccagaacctggtaaccaccatcctactctctacttctacaagtttgactttttcacattccacataaaattgagatcatgtggtttttgcctctctatgcctggcttattccacttagcaaagtgtcctataggacatttgcttctttacaaaataaattgccatgtggtacagtggcactgttttccaggttgttgatattccaattttgttcataattatttgataaatatatgtcttaaatgtttatgtaattacatcagtttatttttactgctttattggctttagatttctaagacactgtcttggaaagtgaagatttgactctgggatcaaatcccagctctagaacttactctgtgaacttgggcaagttacttaacctctttctgcctcaattccctgatctataaaatggggtcattgtgaagattaagatgttataatctaatacaataggtatacctttattttatttcttattttattattttagactccccttttattttatagttattctaataagtatttttttaaacagcacagatgctgcctatccttatttaaaagaaaaagctctggggtgccgaggctacaatcggtccccagggagaccagaaagaaccaccgtatttcattaaagcaaagatgtgccattacttatgtaccattaaggagaaagaaaaaatacagattataagtctgccacattatctcaattaaaagatggattccaagttcaaagatgctaaaatttaagggggcagaattgcatcttagaatgaatgagatgtggtgagttttatatgtgcatttgtggctgtcatgcaccatgctaacattttacatatgttattctgctaaggatagcattatcatacccatttcacagttcagatgatattattatacccatttcacagctgagaaaatggaagttctctaagacaaaattctcaggatagcactattatatccattttacagttaagaaaatgtaagctatttttgcttctgcatttttcctttttttaattttactttaagatccaggatacatgtgcagaaggtaaaggtttgttacacagttatacgtgtgccacgatggtttcctgcacctattaacctgtcctctaggttccctcctgtcacccccaactccccaacaggccctgatgtgtgttgctcccctccctgtgtccatgtgttctcattgttcacctctcacttatgaatgagaacatgcagtgtttgattttctgtttctgggttagtttgctgaggataatggctttcagcttcatccatgtccctgcaaagtacattatctcattcttttttatggctgcatagtattccatggtgtatatgtaccacattatctttatccagcctatcattgatgggcatttgagttggttccatgacttccctattgtaaatagtgttgcaataaacataagtgcacacgtgtctttatagtagaatgatttatattcatttgggtatataccgtgatgggattgctgggtcaaatgatatttctggttctagattcttaaggaatcgccatactgtcttccataatggttgaactaattaacattcccaccaacagtgtaaaagcattcctatttctcctcagtctcaccagcatctattgtttcttgactttttagtaattgccattctgactggtgtgagatggtatctcattgtggctttgatttgcatttctctaatgatcagtgatgttgggcttttttttcatatttttgttggctgcataaatgtcttcttttgagaagtgtttgttcatatcctttgcccattttttaatggggttgatttttttcttgtaaatctgtttaagttttttttaaagtctggatattagacctttgtcagacgggtagattgcaaacattttctcccattcggtaggttgccagttcactctgatgatggttaattttgctgtgcagcagttctttagtttaattagatcccatttgttaattttgacttttgttgcaattgctcttgacgatttcattatgaagtctttgcccatgcctatgttctgaatggtattgcctaggttttcttctagggttgttatggttttgggttttacatttaagtttttaatccatcttgagttaatttttgtgtaaggtataaggaaagggtccagtttcagttttctgcatatggcttgccagttttcccaacaccatttattgaataggagaccttttccccattgcttgtttttgtcaggtttgttaaagacccaatggttgtagatgtgtggtgttagttctgaggtctctgttctattccattggtctatatgtttgttttggtaccagtatcatgctgcagccttgtagtatagtttgaagtcaggtagcatgatgcctccagctttgttctttttgcttaggattgtcttggctatatggggtcttctttgattccatatgaaatttaaagtagttttttctaattctgtgaagaatgtcaatggtactttgatggtaatcgcatcgaatttatgaattactttgggcaatatggccattttcacaatactggttcttcttatccaagaggatggaatgtttttccatttcttggtcttctcctttatttccttgagcagtggtttgtagttctccttgaagaggtccttcacatcccttgttagctgtattcctaggtattttattttcttcatagcaattgcgaaagagagttcattcatgatttggctctgtgcttgtctattgttggtgtaaaggaatgcttgtgatttttgcacattgattttctttcctgagattttgctgaagttgcttatcagcttaaggagttttggggctgacatgatgggtttttctaaatatagaatcatgtcatctgcaaacagagacaatttcacttcctctgttcctatttgagtacactttattttttctcttgcctgattgtcctggccagaacgtccaatactttgttgaagaagagtggtgagagagcgtatctttgtctcgtgctggttttcaaaaggaatgcttccagcttttgcccattcattatgatattggctgtggatttgtcataaatatgttattattttgagattattttgaaactatcaatacctagtttattgagagtttttaacatgaaggcatgttgaattttaccaaaggccttttctatatctaaagagatgatcatgtggtttttgtctttggttctgtttatgtgatggattatgtttactgatttgcatatgttgaaccagccttgcatcccagagatgaagccaacttgatcatggtggataagttttttgatgtgctactgtattcagtttgccagtattttaatgagaattttcacatcaatgttcatcaggaatattggcctgaagttttctttttttgttttgtctctaccagattttggaatcaggatgatgctggcttcataaaatgagttagggaggagtccctccttttcaattgtttagaatagtttcagaaggaatagtaccagctcctttttgtacctctggtagaatttcgttgcgaatccatctggtcctgggctagttttgattggtaggctattaattactgcctcaatttcagaacttgttattggtctatttagggatttgatttcttcttggtatattcttgggagggcgtatgtgtccaggaatttatccattttttctatattttttagtttatttccatagaggcgtttatagtattctctgatggtagtttgtatttctgtggggtcagttgtaataccccctttatcattttttattgtgtttacttgattcttctctttttgtctttattagtctagctagccatctatctattttgttaatttgttcaaaataacagatcctggattcgctgattttttgaagggtttttcatgtctctatcttcttcagttctgctctgatcttacttattttttgccttctgctggcttttggattagtttactcttgcttctctggctcttttaattgtgatgttagagtgtcgatttgaagtctttctagctttatggtgtgggcatttagtgctttaaatttctcttttaacactgctttagctgtgtgccagagattctggtatgctctctctttgttctcattggtttcaaataacttcttgatttctgccttaatttcattatttaccaggagtctttcaggagcaggttgcttaatttccatgtaattgtgtggttttgagtgagtttcttaatcttgagttctaatttggtttcactgtggtctgagagcctgtttgttaggatttcagttatttcgcatttgctgagaagtgttttacttccaattatgtggccaattttagaataagtgccatgtggcactgaaaacaatgtatatactgttgatttggggtggagagttctgtagatgtctattaggtccacttgatccagagctgagttcaagtcctgaatatcctgttaattttgtctcattgatctcatattgacagtggggtgttaaagtctcccactatcattctgtgggagtctaagtctctttgtacatctctaagaacttgttttatgaatctgggtcctcctgtattgggtgcatatatatttaagatagttagctcttcttgttcaattgatccctttaccattatgtaatgcctttctttgtctttttaaatctttgttggtttaaagtctgttttgtcagaaactaggattgcaacttctgcatttttttactttccatttgcttggtaaattttcctccatccctttattttgagcctctgtgtgtctttgcatgtgaaattggtctcctgaatatagcacactgatgggtcttgagtctttatccaatttgccagtatgtgtcttttaattggggcctttggcccatttacatttaagattagtattgttgcatgtgaatttgtttctgtcatcatgacactatctggttattttgcatattagttgatgcagtttcttcacagcgtcattggtctttatattttggtgtgtttttatagtggctggtaccagattttcctttccatatttactgcttccttcaggagctcttgcaaggcagacctggtagtgatgaaatccctcagcatttgcttgtctggaaagaattttatttctcctttgctcatgaagcttagtttggctggatatgaaattctgggttgtaaattcttttatttaagagtgttgaatattggcccccagtctcctctggcttgtagggtttctgctgagaggtccactgttaggcaacctggcctttctctctggctgcccctcacatttttttcttcattttgactttggagagtctgatgattacatgtcttggggttgatcttcttgtggtgtatcttagtggtgttctctgtatttcctgaatctgcatgttggcctgtcttgctaggttggggaagttctcctggataatatcctgaagtgtagtttccagcttgtttccattctccccatctccttcaggtactccaatcaataataggtttgctcttgtaacatagtcccatatttctcagaggcattgttcactccttttcactcttttttctctattttttttctgcatggcttatttcagcaaggtggtcttcaaactctgatatcctttcttccacttggtcaattcagctattgatacttgtgtacacttcctgaagttctcctctgtgtttctcagcttcatcaggtcatttatgttcctctctaaactggttattctagttagcagctcttctaaccttttatcaaggttctttgattcttttcattggattagaacatgctcctttagctcaatagagctttttattttctgaagcctacttctgtccatttctccagcttatcctccatccagttctgtgcccttgctggagagacattgcaattatttggaggagaagaggcactctggtctttaggattttcaacgttttttcattagttctttcttatcttcatgagtttgtctagtttcaattttgaggctactaacccttggatggggtttttgttgggactcttttgttgtcgatgatgctgttgttgttgtttctttctgtttatttttatttaaatggtcaggtccctcttatgtaggactgctgtggtttcctgggggttcatttcagactctattcatctggcttactcccatgcctggagatgtcactcaaggaaactgggaacagcaaagatgtatgcctgctccttcttggatgtctgacctacaggggcaccaacctgatgccagtaggatcactcctgtatagggtgtctgacaacccctcttggaggttctcactcagttgggtggcactgagaacaggacctatttaacgaagtactttgtcccttggtgtaggggatgtgctttgcttggggtaaatccacttatctgggctgcctggattcttcagaactagtaggaggagaggctaaatctgctgctctgcagagactatagccaccccgccccctagaggctcaggcccagggagctcacagttttgtccctgagcctctggctggaattgtaggaattcttgcagggaagccccacccagtgaggaagaatgggttagggtcaggcctgaagaggcgttctggccacagtctgccacagccggtgtgttgggcttttgggggcacctcttgggaccaagccgtccagcctccctggctcctgcaggggaaaagtgcagcctggagctatagagatgaattctgcccttccccaccccagggagcttagcgcattaggcagttatgagtcccagtgctggctgctgcttctccctcaaggagctcaaaaggcttagagagcagtcagctgcagctgtggtgctagtcacccctcctcccaggaactaggcaggcttaagcagattctagctgagaggctgttgaaaatctgcacggctccaggattgggaccctaggccccggtggcgtgggttcgtgagtgggatctttggatccatgggttgcacagttctgtggaacaagcatggtttccctggctgggtagcatgcttattcaccacctcccttggctgggggtgggggctcccctgccctgtgtggctctcaggtgggccacggcaccacactgcttttcctccctctgtgtggatcatgccatcgcctagtcagttctgatgagagaaactggataccttaattgccagttcaggattcacactctaattgtgattcttttcgatgggagcctctgatggccactgcttctattcgcccatcttggccccacgctgaaaatgtaaattctgtaaggtgaatttaagtgattcattcaaaaattacaattcagatacaagacatgctgctagatgctgaagataccatggtgaggaagatcaaaatctttgtcctcatataagatacatgttactgaaggaggcctgtaattagaggaggaagatttaacctagactaaaggatcttgtgaggcatctcagaaaaggtattgtttaagataacatccagtggatgaatagccattatctagtagaacatagcaagagaatttctgcattggaaattgaaaaaaagtacttagtccaaagaagcaaagaagagtggagctatgatttaaatccaggtctgacagactccaaatcatgagcatgctcacttatcacctgcagaggcaaatcaggctgtctacctctgtaacttcttgccagcccccaatgaatattttcatataaattaagtcaattcccaattaatgtcaaaagtacccttaaaggtaaaatatttggacaaaaggtgttaaatctaagtgctatatcagtgtttttttgtttgttttttgtcaccaccacctcccaccatcacctattctgagtctttcttgatttgctgccaagccattccatgactcctgacaggcaatgttcaaagcaatcagatcaacttactggccaagagataacccagaaaagggcccctgtttggtttatatgtattatatccccacagcactcaccaaagactccttgatctgcacacaaagctctaaaggaagtagcaatttgagaggatccaaaagctactgagaaaacagaatagatagactaagactgctccctaaggagctattcttccggaagattgggtcttcaccttagagagtaagaagggagagggacacaggagttcttacaaaactaagcctgtatttgaaacatcagttatgcctttgccatgacacacaaattgaaaaaataaacttatgtttgcctaattataagaccaagagcatcaaagacaatacatgtggacatgttcacacatgcatcagcagtacttctttatttagcatgaaaaagtgaaatgttggcattcataacttgataacattttaaatgcctttcccacatatcctctattcctgtacacctttcctccttctccattgaatttgctgtttcctacacaggtgcattacaaaagatgccaagtataagccaacagatgttgccaaaaaaaaagcaagaagcaaaaacaaaagctttccatttcttaaaaacataaagccacaccttcttaagaggctagggtcatgtacatcagactacacatttatatttatttgaatttgtttttatgccacctctaaatggtggataagtttgttgctttcatcaacaatgaaggcaacattaacatatttcatcagatgtagcaatggaagtggcacctatgatagcagagaaagttctgtgcatctgcagtatgatcaatctgagaaagcaaacacactgcttggtggagcctatgtgtgatgggtaggttgaagagagagggggaagggggctgagcaggctctcctctgagctcaaagaccttcaagaatatagagtaaaaaaaagagagagagagaatgtaaactaataggaagctggaatgacttgtattatccatttaagacagagataaattagacttgtcctatgtccgtctgattttccgacttcaatttagtatacatgagatcttttatgaccctgtttatcattgtgcattgtaatggctgaaaatttcattgaaatgcatttttgaagcattttttcagttactttgaaatttctataaggtaaattaggcaatattttccattctctctgaccacctgtcctgccacaggaatgaccaatggtcagcattctctgattatttctatacgggacaatgaggttcccaccttttttttttccagttctacccatgtttcactttgccatacacatgtaattcattgcttaatgcatctcaatacatttgtgtgtgtgtgattttagtccaggtaaaattatgcacatttattattatttattccagagagtacaaaatactaagattttgaggggtagaaaaagcaaataaatacctgtgtaagaatatagtaactaactgctatatgttaaaacctacctgggttgaaaaaataaaaaataattacagatggaatgtaaaagtaagtggactcccagtaggtgactcaaccaacactgcaagttctactgccccagatggaaatacgtctctcgccgcaccaccaaataagtcactacaatagttcccacttacccacaagagatacgttccaagatttccattggatgccagaaactgtggatagtatcaaaccctatatacactatgttttttcctatacataaatacctatgataaagtttaacttataaattaggcattgtgaatgagtaacaataactataaaacaataaatatgtcgatatactgtgataaaagttatgtgaacatggtctctctaaaaataatattattgtactatactcacccttctggtgatgatgtgaaacaataaaatgcctatatggtaagatgaagtgaggtgaatgatgtagttattgtgatgtaagtgggaaaattccagaaagagcaattcataagttttaaacgggacatcattcagagtagcatgatgaaatctcacgccatccttctccattctgcctggattgtcgttagttacttagtagctgccatctcagttatcaagtggactgtcttggtattgcagtacttatgttcaggtaacccttattttgcttaataatggccccaaagagcaagaataatgatgtaataccttcaggctgcgattgactatgggtgacttacattgtggaatgtgagactatggtaaaagggggaccactgtaattgaatttgtgccaactagagttcattctaagcacctgttaaacaaatacatttgtattattttcattagttcaatataatattttccttggttgcaaagggaaataattagtttgttcatgtataagcttagagctaaaggtttcttttcctctcttctccctttggaataactaaagttgaatggaaacataaatgaggtagaactgcttgctttgaacacttaatgtgaagaggtcatgtaatttttctattcctgcttattccagttcaccaagataggaaatcccgtggatggaaaaaaaaaaaaagttggtttgactgcaaggcatcctgtgttttatattttaaggagctgagttgggcagaatacagtttcattctacaagaagaaaatgacaagtgacttttactgtgtgtcatctaaaaaatatagctagatatagttcagtgtggggatttcaaacaggtttcatctcatatgctaactttcatcagttattgctatctgccagggacaagggaccaggagtggcagcagatatgcacatatttgccatcctttaataagagtaatgaattggtagttcagaggatctgtgttcaagttccaatctgattattttattgtgttgtaactcaacacaatcaaatgcttttgagagagacagagaattatggaagaagaacaaaaaggagagaaagggggaataaataatgaagggagaaagagaaaagctgaggaaaagaaaccacactcagaaaataatttgtgaaacagtggtaaagaagcactggatattgcatcttacacttaataaacatatgctagaataaaaactttcgtacacagattgtgagggctttgatgttgaatgacacagttgagttggcagagtggttttctatcatcagtctcatctagttctgataggatgactgtggagaaagaggtcctactgatagcatggcagagtggaaagagaaccaaggaggcagtcatagaggtctggattttaattctggctttccacttagttttctcatttttaaatacaattaatataataaagggcaatgtggaattgacactccttttatcagggctagtcttgtgactgtccctaagcaacagaaagtggaagcagaagtaatatttatgtgtctggagccctactctctataatgtcttgcagcttccaccttcactgccttgaaagcctgaggccattatgagtgaagaaggtcagtctaccctactgaagactgaaaagccacagtaagagaaatggagtgcctcagtcagcctcaacttccagatatctgactgaggctcccttggaaactccatccccagtggagccatcagatgacagcagccacatgagccatgccaggtgagactgggagaagaatcaccctgattatcaacccacagaattatgagaaataacaaactgttattattttataccactaaattttatagtattttgttacaccataatagataactaatacaaggacaaggctcacattgtaggatcataacaaggactaaataatataatgtattatgtaaagaattcagtaaagtatggatactattaccacaatttaatggtattattcatgccctggtcacagggtttttaattgtgaggtaatgtagtataaaaattaaaagcaagggtaaaaactttgaagtcactgtacctggctccactccactcagagtgagacctctggtaagctgtttatctgtaaaaaagggatggtaattatactcacctgataagattattgtgtagaatggagataaggcatgcatatcaatgagcatagtgcctggaacatagtaagcatttaataaagtggtacttaaagattttagtggttttccattttaaaatatcaattttttaaattccttttatggcagatgttattattgagtagagattttatgagccttgaggccagcctagtgcttcatcccagtcaaggacatagacaagacaaagggcgcgtgaggtcttgcagtgaagaagttgacaacacatacaggtgaatttatggcatcatatacagggtcagttaccaccagatggctcaaaagacaggcatgggcagatggcattttctagagatcagtcatgactaggtggttgcagtttaaatgagtaaaaagcaacagataaagcaatgagtttaaactaagagaaggagttgcatcactcaatgagttatgaacagtctatctgaggtaaaacaaaggctgttgactctatgccttattctcaagcacaattccaggcatgtgctgctaagagttagtcaccgttgggtactttctcagtccaggttgtccaaaaagtagatgacaagatgtgaataaatttgcaagggtgttattagggaaatacttgtgtgagagaaaatgggaaagaatacagacaatactggagagccatcaaaccatggtgcaagtctggcctcaagaaatggagaaagaggaggttctgtaaaagtgttttagacaatcatggcctctggggaagttttgataaggtctttcagggggttcttgggccaaaggtgtccatcagagaagtcccatgtctcccaaggatgcgtctaccataggatccctgccaagctcagttattggctggaagcacccatggaaagtatggcctcagtacatatgtggcctcagtacatatgtggcaatagacttcagagcaaggtacttggggcacaggtgctacatccaccaggaactcattaatattctggcaaaattaccagtgtgttttagttgtaaacataaggatgatatacaagtgataaagctactctgtgacctgttcttagtctcactaaaggcaagaaggtttcagagacttgaagtggttggtctctgttctgagatactggttttactacttttacaaaaaggcatggcaaaaagcaacatgtctctttgaataattgacagacaaagatctgcccagcattggctgagtcgagtgttaaaaaggtaacagtaaaactgaaatagatcctctgacatctctgctaacaagaataattgcttctccacagagagacctgaaaagaggctgaatagatgtctgaaatcaaagaatctttatcatcattcatatttcaaagaatgctatttcattatgatatgtatgaagatttagatctccaaaagcaatcaaagagttaccaagttccctgaatgaaactatgtaatattttaatatttacaacacaaacccacttgcaatttcaaccaagcaagtatattcacctctctttctctctttaattttaaatatttccctttcagttcaagtgaaatgttttgcaatagccagataaaagctcttgaaaacacacatgacaatttctagagtatgctatcctgatatttctaagttctatattttattcctgtaagtatttatcaagaacttacctgttcatgcccttcctttatttacaaggggaaataaagaagaccaaaccagagtccatatcctcaggaaatttccaataccaatgagcctccttgaagtcagaaaaaaaaaatctgttaatctctagaactgtcatatgctattgtgcaggttgtctgctgtccaaaagtctccagccaaggaaatgaatggaggtctgaaatcacccatcctttgctcatcaagctatgcaacctaacatgaaactatgtcttcccagaaaaaagggttcacttttctaaatagcacaaagcttgctgggtgtggtggctcacgtctgtaatcccagcactttgggaggccaaggcaggtggatcatgaggtcaggagttcgagagcagcctgaccaacatggtgaaaccctgtctctactaaaaatataaaaatcagccaggcttgatggtgcaagcctgtaatcccagctactcaggaagctgaggcaggagaatctcttgaacccgggaggcagaggttgcagtgagctgagatcgcgccactgcaccccatcctgggtgacagagcaagactcagtctcaaaaataaataaataaaataaataaaaataaatagtacaaatgtgccacatgactaatagtaccctgaaaatagttttgaatcctaagtgtactcagtctgtagcacctagttgaaactgaagttgaatgaaacaattatgcatcaaaaaatgaaaactatgttccattcttcacatgcaaagtacagaaaatagtttgtcttagagatcagaatatggatagattgccataggctatatcatccttggaagactgtgtagcagaatcaattctcaaatatacacatggatgattcacaataaagattattgaaaaggtcagagcaaacaatcttgtgggctttgaatggcaattggatgatttctgggactcagcaaaattactgttgtagtgtattttgttcatgctggtattcaagaaggtctgtattgctctaatactcattgactgctggccagaaaggcaaaccctagattaggaagatgaagcttactgggaacaaacactggttgaaaatcaatctaccaaagggataaaccactgactaataatcacatctaataaaatagcaaagaaaaacatgtttgccagaactccagaagcaggctgactggctaagtggaactgctctccaaaagagaatcaggtacagctggagactgaatgcagtaggttccatagggggacagatataagacagcaaagtttgcagagtgacagtggttgatatggcaaaggcaatatcctcatgctgggaaatcctaaccaaggactcagaaatggaaccaaatacaatgtaagtggttggtcatcatcttatcatgttcactgttgtctgtacaatccagaagaaagtaaacttgagggaccttgtaggatatggataaagactttggcttttcttgcagatgagattggaagccatcagaggagtgctataaactggactcgaaatattaaaaagtcctctggctggtccattaacatttgactaatagggcaagaagaggtatgttatttaaagggtgcttcaataatccagatgagagctgtcagtggctcggaccagggtagtgacaacagaggtggtcagaagtaccacatgtgaacatggtatattaggcataatgccaatataaatgaatttttttcaatgaatttatatgtaattgtagttctgaaactactcatctgtattctcttgccatcatctccattttcccactcctgataactgaagagggttatcatccttgcctgaaaacatcttacttgaacccttaaaaataatagcgggtttttaatgtttacgaatagagacaatgtaaaccaacctttaaaaaaaatagatgaggagtatttttgaagactaaagtgaaacaaacaaatggaaagaaactaacactgctctgcattatactgtccaaagcacttttgagggatacttttggattatataatttttaagaagatttattgattgtcaagttggtttttattttgttgcataaaatcattctattcaaaattattttccaaatataattttcttatatatccatgtaaaagcaaataaaactgtactgtattattataaaatgatacattaattattgatataaacaaaaaagcagaaataagagtaattatttttacatagatcaatttattaatttacttaaatcagtttcttagtcatatctatcactaataatgtgttaaaggtatttttcttaaagtcttttttgatacacccttattatttttaatttctaaaataaaattacatgctcaccttcagtgttccattttatatttgatgtatttaaaattatttacaccttccattgactcttctctgtagaccataatatttttaatggagaaaatctctctcgacaaaagttgaggtatctattaagcacacagcaagttctagtaaatggatataattatctttctcattttttcatcctgcataaatatttcagaacaaatatttgtatgggtactgcacttttgctttaattgatacttttcttcaatgaataattatcaaatgtttctgattatttctgattatgtttatcctctaattgtgattattctgtatactttgtcaactttagatattgtaactttatagacctttgcaatttcctgtcatcctagcagagaagctaagtttttccaattaactaaaaagtgtcaccaaagtattcttcccagtgtcatcatattccaaagtgtaattatcaaatttctcaatgacatttcttacaccagtgcttctcaaattttgatgtgaacacaaacgccccagaaatcctatgaaatgaagattgggattaagtaggtctgaggtggaagagattctgcatttctaccaagttcccaggtgatgctaatgttacccagtgttactggggggtccttgctctcaaagctgccaagatggtggctggccacttccaaaatggcagcgggccactcctaagatggtggcaagcctcgtgttctctgacctggggttcttggcctcacagattccaaggaatggaatcttgggccatgtggtgagtgttatcgctctattagaagttgtaggtcatggaagagaaccgtggaacccagtgactagtgttcagctcgattaggacaaacctaggcacttagccatgcaggaacaatggcaagcctttagcccaatcgggagtggaaatgggcacctccctggatcaggagcaccctggacaccctgctggatctggagggatggaagtcagtggcgggtctgtgacggcggcaaacagcagtggtggacggcgagcgaaagctcagctccagccataacaaacacggaccagaagactgcagttgcaagatttaatagagtgaaacagagtgaaaacagagctcccatacaaagggaggggacccaaagggggttgctgtttgccagctggaatgcctgggtttatatcccaatccttgtcccccccactgtgctctcaggcaatagatgattgactatttcttttcctcctgttttagcctaattagcattttagtgagctctctgattggttgggtgtgagctaagttgcaagccctgtgtttaagctggatgcgatcaccttcccagctaggcttagggattcttagtccgcctgggaaatccagctagtcctgtctgtcacgaggaccacactttaaatagcaaagttacaatgttacaatgtcggcttttgctcttgtgtttatacagttactcttttccttttcgaaagaacaattttagcgacttctcttttgcttgctaagtacttccaaagctgcagattttttttgaattgatgtgttaaatattttgattaaagattttcaactgattttgaataaaatgcaaccaaaacttaagacttactttaaaaatttttactcccattaccatcacaaagcatttagtttgttttaaggagtagctcatcgcaaattcaaatatttcaaaactctgatgctggctaaaagaggtaagcatgtattgccaatgagccaaaatgccaggacagtttttaaaaagtaatactatcttctcaaaaaaagttgcagtttttactttaagtaaatttatatggcaacatttagtatttttatatctacagcttccatttttactggtagatagcatagatttagatgtaattataaattatatatgacctatatcaaattccaagtacatttctgctccctggcctattaatttaataagaacgttattttcaccaatacactgtactctactaaaatctgtgctcatattttttccaaaaacaaatattttctattaattgttaatatatttaattaaaattataataatagcattcacaatactgtcaaatgttgtaactttgacagaaggactgtgattccattcattgtgacttcaaagaatcaactattactaaatttatcttaattcatttttaacttgaagcatttgctgatattgagaaaaaaagtggcatcatttcaatctttgcaaagtatttctgctgatgaagtaatcatattaatagttatttctttacttttagtatgttcacagggaaagttggaatcaataatgaaataatgtaatgcagtcagctgatctagatgaaaagtcatgtttcacagaatgagatgtaagtgcactttctgcagctgtatgtgctaacattattgtgaccaggacaggatagttttcttaaaagtaaccattaacatttgaagtagatcctgatgctttcttagcatatttatgactctggtttatcataataatcccttgtattagtctgtttatacactgctacaatgaactgccaactggataatctacaaaggaaagaggtttaattcactcacagttcagcatgaggtttagttgactcacagctcagcatggctggataggcctcaggaaacttacaatcatggctgaaagggaaggggaagcaaggcaccttcttcacaagttggcaggaaggagaatgaatacaggaggagctaccaaacacttataaaaccatcagaactagtgagaactcattcactatcacaagagcagcatggggagactgccctcatgattcaattacctccacttgggccatctcttgacatgtgggaattatggggattgtggggattacaattcaagagattttgggtggagcacagccaaaccatatcatccccttaatggataataattgtcaacaaatatcttattggagtttcacattcactaagtgtttaagaaataaaaatttatatttaatttcttattaaatatacattattctttttgctttaactcattgctgccaagaattcattgaaaacattttttaaaagcataaatagtaaaaaataaattgctgtagcgttaccattaaatagatgacaaaaatcattgtagcaacagcattccaactactctctatttccctacatattgcacatgtatctaacctataagtttgcatgtttcccactgtctgcaaccgtgatctggttctttatttatctagcatcccaaggcaggaccacggcaattcaccaagtggccagcagagatagcaacaaaacaacacctctcccaacaacacctaaaagtaggtgttagttatctctagcttctccaaaaagagtctactttatttcaccaacaggaacccttaatgctgtcaatgaaaggaaggatttagggtgttagttaacatgcattttcaaagggccagaatagagaaatgtggcatcactagtccattttttacattaactacatgttaaagtgaaacctctgttcactgcacatgcaactcacagttggcatggcagaagagggaaatagaaatgaaatcaaccaaatgcacactgcttattttaatgcagctgtcaatataacactatgcttaaaaatgaaaaatctaagaaaaacactaaagcaaactgggtattgtgattatagccataaaccagaactgcctcaggcaaaacaagaggtagagtatttctaattatactgtgaagtacaatccttgctgtaagaaaaacaatctctcaacttattagggcagttaggaaaacgtttctcttgtgcataaaggatgtagatggaaggcagttatctttgcttataggacaaatttggccggcagacatattttgttggctcacacagagttgtttttgacttgaattacttgcaaaaaattaaattggaagatttcacatagaattgtggcttctcttgaaaaaaaatgcaagatctgacaactctaagcttgaatttccacatactgaaaatcagcgatagtgtcacaaaactacattattttataaactcaaagggcaccacttagcttgtatcctaagtaaaattaatacaatgaaattgtacctatgttatataaatatgccaaccccctggaattgagcaactcctagtgccctgaggtctatgaaggatacctttagaagaaataagtagtctttggtttgccacaattcctaccccacttaattaattcacttcactgcttggtcaagtaagcaattgaattttttacttttggtttagactacactcttcctaagaattgtttgttttttaaaggtaaagattcctctctgtctgattttatagttagtcactagacaacccagtgtatcttaaactcccacttctggagaatattcaaagggaattgccttacaccatcctgcattgttgtgtaggttttgagtgataaagccactcataccctattactctttgccagaggctggtctcaaactcctgacctcatgataacgcctgcctcagcctcccaaagagctcagattataagtgtgagccactgggcccagcatatgctaaagttttgacaccataagcattataccagtcattcccattgccagtttaaatgtacacccttgtttaaaaggctggaatgcatcttagtgaataaggtatattaaataatgtcaatacacagcttgttaaagctgacaatggatcctcagaaggtgtcaaacaggagcagaacacagcctttatcctgccccaggttgcttaaagctgaagtgtggtaaattgggcatgtctgaaatggaactgtcaagcttagaaggtctaatattgaatctttccatacagatctcaaacagactaacatatctgggcacttgaacttttcttgggttacaaagtacctgaaaaataatacttatgagagttactaaaaatgccctgtgagacaaaggagcaagtaaaattattacatgacaaattatgtccttctacaaatatccatagattctaggcaatttcctttcacagtttaattccaaggatgcaaataaggcaaataagtttccctttgaagattaccttccttccctgatgcttcatgatggctgtcttttttatattcttgagaaaaagtgttactctgctgtcacccaggctgaagtgcagtggcataatcatagctcactgcagccttgacctcttgagcttaagtgatcctcccacctcagtctcctgagtagctaggaatacaggcacacgccaccatgcctagctaaatttttatttttattttgtagacatagtgtctcagtaggttgcccaggctggactcaaactcctggcttcctgcaattctcccacctcagcctcctcaaagtgctgggattataggcatgagccactgtgcctggccattatggctgtcttgagcactgagttgaaaaggcatctgaggccacttctaggctaaagctagagtatcacagtccaggctggccagggaggtctgggtaaatgctgtcagcacagagtccaggtgctggctgtggactgaacttctggatatggcactgacctacagtatcagtctctgtttgaggtcatgttcagtgtagttaataagttaaaattctgtggatttacagggagaggtttattactgaactaaattcatcttcctgtctgatattacagcatagaaaaaataactctaatgaaatcaggatagaggagtcaagattgtacattaaaaggaactaacagtgtattctgagtaagggaggtataaaaacaataaaataaagcatcaagtcaaagaagacagcaggtaatgaatttgaagcaaatgattgatcccagtggttgaggaaatagcaagagagttcaggggccagaatctggagaaagtctatgagacaagaatatacagaggaagggagctctttttctatgcctaaagttgaagctgtgaatggagagaaagctattcaaggtgaaaggccaagtttgactctccaaatattggtaataaaagttaaccgaaatggatttcactgacaattgcagagaagtgtctggtacccagtgtgccaaatattatgtaaaaaggaggccaggcgcgatggctcatgcctgtaatcccagcactttgggaggccaaggcgggtggatcacttgagctcaggggtttgagactagcctggccaacatggcgaaaccccgtctccactaaaagtacaaaaattagcggggcatggtggtgggcacctgcagtcccagctactcgggaggctgaggcaggataatcgcttgaacccgggaggcaaaggttgcagtgagccaagatcgcgccactgcactccagtctgggtgacagagcgagactctgtctcaaaggaaaaaaaaaaggaaaaataagtgtaggtatgcaacatacaacaaaataagaacttataagatttacaggacattaaataaaataggttaactacacataaatatgcactgccatatattttcttctttatccaacctttaatatgtctacaacaggagttcttaaaggtaaatgagttgaaaacaatgtactgaataatgcccgcctatcccctcccctcaccccctggaaatagattctgtcttagagcctggagagggagtgcagcactgccaatatctttatcactcagtgaaactcattttggacttgacctctagataataaatatgtgtcatttataagtcaccacatttgtagtaatgtgttacagcaacaatagcaagcaaatacactatgcagactaataacattgttattggttaaatggaatgtttattttcaataagagataaagaatctgacataatttcctgtacttgcatagcaggaagtggaaacagattcaaatttattttgtcttaagtttcctggagattgggagataggggtatatatttttgaatgaactcatatggctaaacacagagaaacgtcctgagtgtactctttaaatattcagcatcaccattgttcaaaccttcaagattccagggcctcatactaaaatcgtaggaattggatgagaaaaatgtcctaggagggaatttaaatgaatgagaatactcgcagaagatgacacaggcgaagagtagagttgaaagctgagccccattgcacaggagggtgctcagaatgagagaaagcacttgctagcaacttccaaagcagaaatatttgccataaaggaaaggtatgtgagaatcattatgcctattttttccaacctggagaccatttttgttcttctagattttacaaccctcttagctcaccttgtgtactcagaaaaatagtctcacttcatgctgagcaagtaggttggatatcagttctatttctcaggtgaatggtaagatttttagttcaatgagaaagtacagtgactggtgaattcgaaccccctaaacaactaagcaagcaatgaattgcacctccaaaatgatcgattgagccctgaatcaaagaaaaggtgtgtgtctttatgtgtgtcataaaagaggttgggtaaggagataactgagttgggaaagactggatttcttttaatgggctccgtatgtttttcttgacagagctcatcttgattgaagaggctgcatgtctctggaaagcaccaactcattctgcgtcgagtaataattttgtgcctgtagtcaagctaacaccccgcccacccacccactgcaacgcctcacacacacacgctgagatagaaaaacatgtgcatccctgcttcattattcaacctcagtcatatctatggctttctcttcgaatactctgtggactaatcactgacctgccggcagacagcagttgatttgttaacacaattcaaagcccagatctctggagattagagattgccgggaataatactagtgcagttattatttagcaccaaaatttccacgatttcataactgctatttcagaactgccaccccacctctgtttcattatataaccctagaacagtgaatagacagtgctatgggatgagggaaaaggaagactaaaacaatgtttcacaaatgccagtaattccctggccactctcatgatttgtaccaacgtcatgcaccattggtacaattatttatatagtgttatcccttaaattgactcactgtttttacttggtctcttcctaaccagataataaccgtaacagcgtagatttaagggataacattttcaatgctcattaaaatatatccataactgatgcaataaaaaacttgtccacatacaacctaaaagcatcttacgtgcctcataagtcacattttgggaaatactcaactgaaatcaatttcagctgagggcttctagaatttcagactcagtccaaaatacgcaagcttaagatggatgaaaaggaaggagtggaaaattatcattacagactcactcctcatctaaataaaccattgtttcactccatttttccacatccttattactagtagataccattcaagtaccagcagctgttagaagaaactaaaagggaaagaaacaggcataaaaaagaaaggaaaacatgaatctgacaactgaaatcgaatctgcttggttttccactattcctgtattttgtaggttgaaaggctaatatcaaaacattgtgattttaaaaacatcataattataggatcttgaatcatgttgtcatcgctccatgcttttgcctttgtctctcttttaatctccttaatgcaccataattatgtcttctgtgtgggtcaattatatttgaactagaaaacaaattaccatcattacctctgattattcttctcttttctttgatcttgttttgtgcagcaaccagaaattttgtgttcattcagcccttctcttccccagttgccttgttggcagagctgaaatacagaagaaaagaatccctctgccatttccagtgttatcttttcccttcatcccactcttcaaacatttctggtgcctgcacattaccaaaatatgttcaaatgatcttattaccaaagtagctcttggctaacatggcctttaagtcacagtgcccctttaatctttttcttcccctccctaattctatttacaaaatccaaattagtacacaaaggctcaaactgcattaataccttaaaaagctactgcatcctagtgtcaataaccctgagattaatagtccccaagtcttatgtgacacagaaaattaacaaggctattttgaccaatgatccatgaattatgatggtactctccactgtgattacaaatgttaatgtaattagcatttattttagttgaaaataaaaagaaggtaagaatggggatgacagaaattacactcaagaaatagaggccgggcaccgtggctcacgcctgtaataccagcactttgggaggccgagacaggcagatcacgaggtcaggagatcgagaccatcctggctaatgcggtgaaaccacgtctctactaaaaatacaaaaaaattagccgggtgtggtggcgggcacctgtagtcccagctactcaggaggctgaggcaggagaatggctgaacctgggaggcagagcttgcagtgagccgagatggcaccactgcactccagcctgggggacagaccaagactccaactcaaaaaaagaaaaaaagaaaaagaaatagaaatattcaggtttccttaatcaagtcttctgaacaggcgtcgagtaaaactaagagggaaggtgacgtgtttgatttctctttaccaagaaggagcataaacaagggatgggggagattcagtgactcattcttttgagaagtcttaccagttatggggcatcaagcatcatgatgatatatcttgccccatattgacaagctgatttcccagaaatccccataacaaattggaaacacatccttaataccaaggcattgatatttgatacttggatttgttgggcagcaaaatggaagtgggaaacagggtttcataggagcaacgtcctctaactcatgctggctggagccctgtatttaaatcaaaaccttcactcctgccacatcttactgccccttctgcatgttatgaggtgctttccttctgctgtttattccccttcatttctggtagcccagaatctgcactggagaatgggggaaaaatctaagagatacagtccactgtggcatctactcagcaaataatacaataagtacttattacttgcaactcaacaaataaaaccctggtgtcttgcaggtgtcagggtacgagactcctctgtctttgttcaatataactattaggtttggggcaggggataggaggactgtgatgctggaataaaacagaaatactttacattttagatgaaaaataatccctctttaatgattgagtcatgagagagggaacacactagaattcagctcacactagaattctcatactgccttgttccagctgagtgactttgagatcacacaaactctatgcatatgttggtccctactctagctacatcacagggcttctgtgaggatgctcctaagtaatgcatagaaaatggttaacattaagatattgtgtataataaaatattgtgcactgagggtgaataaatattctgtttaaataacatgatctacctattccgcctcactttaggtggaaggaggaggacagctctactgtgtattacatgcatgtgacactcagctaggaggttttctcatttaaaccttataacatctaaatgagcataaaattaatatcctgattttgaagctaaagaaaatgaagttccaaaaagattggtaatctgtacatatttaatgtacaatttgttgattcattcaacaaatattagatgctattgttctaggacacagattggctataaactacacctcacaggcaaaatcctatcaaacatctgtttttgcaaataaagtggagcaaataaagttttattggaacacagtcacaaccatactatggttgtttcacactacattgacaaagttgaataactacaacagaaatcatacagtctgcaaagcaaataaaatatgtactctctgggtctttacagaaaaaaaaaaaaaagctaatcactcttctacgagcttgggatacagcagtaacgaatataggaggaaaattccctgctcttgtgggacttacattttagtggaggcaacagtcaatgtaatgcacttaattaaaaagttaatcattttctaaaagttctggaggccagaagtctgaaatcaaagggtcagcaggaccacactcactatcaaggctctaaggaaacctccttccttgcctcttccagcctccagtggctccaggcatttcttgcataactctaatgtttactgtgtttcttctcctctgtctctcataaggacatttgtcattggattcatggctcgcctggataatccaggatgatctcatatcaaaatcctttgttacgtctgcgaagtctctttttccaaataaagtcactttcacaggttccagatagaaatagttgggatgggcaccattcaatcctctgggaaagcagaagcctggaagttttgctttatgtttttatcttatttatttatttatatatttatttagacagagtctcctcattctctcacccaggctggagtgcagtggtatgattagggcttactgtagcctcgacctccagggctcaagtgatcttcccacctcagtctcctgagtacctgagacaacaggcatgtgccaccacgcccagctaattttttttattttttgtagtgacgggttcttgctatgttgtctaggcatgtctcaaactccggggttcaagagatcctctcgcctcatcctctcaaagtgctggaattacaggcatgagccaccatgctcagcttaagttttgttttagacatgctaaatatgagacttctcttagctaactaagtggagatgttgagtagacaacatatggacctggaattcaatcacatgatggtagaaaccaagagtcccaaccagtttttttctttacccatgcttgctcaattatcatggggtctcccattcacagaaacaactagtaaaatggcccttgatatgaggtaatatgacctgcctatgccattccgaatgttgatgtccttgaatataacaaaaacagccccctcttttctcctttaaaagatggtgtggatttgacggagcaagacaagattcttaggggtaggaggaaagtggcactgtttatttccctttggtgattacatcaagcttagcaaagcccagaagacactataaatgcaatggtttgattgttcctggttcccaccttgtgaaacaccacaaacatttataagctggggttaagggtctaaccaatagtttggaagagcaactttctctaacccacagagaataaatggctttgctagcagcattttctaacccatggagataactagctgacaagaaatctgagcattaggtcacttgatactgagtcaacatagaaattctgccaaatcaaaaacttcaaagctcaatatattaatgagcttctggagcctctgaagacctcttactggccagagaaaagatctatcgaagtgtcttctctttaatttaaagtgaaaattgatgctatctgggtgtcaggtataatcatcttaatttattgtggaatatgtaagggactgctgaccgtatgaatgatccaattataggtttaaatgactctggggttccttgttttcccccagtcttattcatgaagtattttcactttcagacaatcaagagttgtttatataggtttgggacttattgatgtagctaaaaaaaaaacgcagaggtggaattacaactgtttacttaaaaacagtgaatttgatatgccaaaaatctaatttaggtattagcaattgagtcaaagctacttttaataagtaacaagaaaatgaatcacttgggacagaataactccagagatggatgatcaaatgtggctccttcctccaaaaggtttctggctccattttccagaatctgcagggatagaaaatatcctcatccaatggtgtgttcagtgacatacatgagtttgtaacctccctaagttcctatcagataggaaacattaggaaatcatttaagagcctggtttattttctcaatctgggcaacaaaggtggattgaatctgctctgccaccttattcttccagaacagatgtgaatacaattcagaggactcagaaaggttgggcataagagaaagagggcaaagtaacatgtccagccccaagactatgactccgtgttctaagggagatactactgtgcaactgttgaaagaataggcaagtgcattagaagagcatttgtgaacgagtatgcattctgcaatttgcctcttctgtgactttagacaaattattcaaactttctaagcctcatgtcttcaagggataaaaaatagtgcatctctcataaggtctttgtgagggctaaatgtaaagaatatatcacccagcacaaagtaagtgattttaattgcagctacaataattattatctgaataataaaagcagggctgtagttaggtactggcaattccaaactcttctgtgtgagccaaatatctgttaattctcagacccagtcaccccaaacaagggactttgatgaaaggccaaatcttctgagagtgtgatctgaagtttgttctcctattagtgaaagtgggaaagttgcttttcttcatttttatgatttggctgagatctaaaggccgtggggcacctggcacagagaactcaaagttattattgaaaactgaaaattttgatgaatctaatagccaaaggcagatcaagtccacatggcatgaaagtagggcaatgagaaaagcagggttgtgataatagtcaagtctcagacctgtggtgagaaataacagaatgaatcagcgtgcaggagaaacaaaccaagccagcagaaatattgatttagatcctttttagaaagaaaatgtctagcagtgaccattcattttgaagtcgtttctgctaccagaagccaaaagccaaatatatctgattagaatcccacctagactggcagtattgccagatcctacccactggtaatctcttactccagcgtctactatgaaagaatcttagactttaggaaagaaaaaaaaatgctcccacttctataaccttagaatgtcttggccaactcagccccttagtctgaggtggagcccacctttctgtacctgaagggactttcactgccttactggagtaacactggcagtctttaaagtctattaagaggagatggaagtgaagactgtgtgtgtgtgtgtgtatgtgtgtgtgtacacaagcacatgtgtgttggttggtgaagaagacacaaagccatctcaaatcctgagaatgagcctgactgacatgacctccaacagcaaacaggcaataataggcaaccacacattcattcctttaacaaaagtgctcattcaagtggaatatgaattaaattactccatattaattgaatgcctactcttgtcaagttgggagggaggggcaggggaaattaggaggttattataataacacaagtaaatgacaatatcattttaggtaaaattggtagtagagaaggtcatgacaagtaattgaaaccaggatacattttgaagatactgctgaaaagattaacagattgaatgtggagtacaagagagaaaggaaactcatgatgactctatgtttcttggcccaggcaactagtaggatgaaacttccaatcattgagataggatgactgtgggaggagcagatttgggagcttaggaattaagagttatgttttggccatattcagcctgagataacaactttacatctaagggggatgtgttgagtaggcagttggatatatgagaagggtttgggaagaaaagtcgtgagttgtagatataaatttaggagttgtcagagttaagatggcttttaaaaccctgaaactggggaagataacctagggagtaagtgtagaaccaaaaaagatatctgaagtctgggctttaagagatgaggaagaataaacagaaaaaaaatagagtgataagtgaaatggaagaaaaactaagagaggcagcaaagtgaagaaagagcttcaagaagagaagagtcagctcttctaatattgatagacctaatgtgatgaggaattataatgaacttctggatttggtatcatggagatcatcaaggactgtggtaagattctttcaatgcaagagaaaacaaaacaccagttagtgtgggttcaaaaaagactgtgagtagaggaattggaaatagctaatgtagacaactttttttgaggaatttttctataaagaagaggaaaccctaacaaagggatcaaaccactggctacttgccctagaaagtaaaaatgactcaggattcccgataggctccagaactaaatttaagttgacaacactttagagatcttacgctcaaccgcactgagatgatggaaaaggatagagataaaagtaaggcacaataccagtcctcagaaagattttagtcagatagaaaatatatttatgatatcaagatcagaaaaaaaaattgcattttgtccttgaaatggccatgttacttaagtatagcagactgtgggcatatttaacattgggggatttttgaatacttagaagtcactctgagggttaaagatgtgtggtcatttgcagttttgctaaagagaaaactggaatgtgtgtgctgttgggctggtacaaaaaagaatcatccatgtactcagcccacttcccagcacctacgtcttactcagctttgtggttgtcaactgttatgttcatgataatatatatcaagtcctaggtcagtcatttaagattttctttcatgctttacagaaaagaaaacataccattatgttccctgtttgagtaacacactactgaacgaaatatttgctcttatcttttcagaattttggctgaagaataaaacaggtaaaaacaataaaacacacccctagattctttttctctctctgtggctatctctctgggcaccatcatgaatgacgcagtaattattctggactaggaaattaatgatgaactaactgattcagggaagacaagtagtaatagatgccattctaactcaggaggcaacaaacctactttacaaatacaggaaaacctagttaaaacacacctagttaaaacatgatcatacaagttgctgtttttctcagaatcagagacatgttgttaatggcaagacaacagattttcgtgatacatatttgttgggttatggagagaaagttaaatccaaacacagacttacaagatatgactcatcaaaacaatagaaggatccaaacacacagcaaagcataaaacacacaaaataagaatataataaagagagtcaagaaaattacaaagataaattcggtattggcaagaataattaaagaccatgcaatactttgatctttggtaattgtaaaaaaaattttcagcagatacttactggaagtaaacatttttaaaagaattgcaagataaatccatgctacactagaggatagaagttccaattcaattactgaaatcccccccaccccaaaactcgccaccatcatcaccttctgcttctggtctatgtaagactagaaattcaaatggttattgaatagagttggtaggagaattttcaaacaagtgaagaattttttttctttctcctcccacccactcagaaagagagttggaagggtagtgcctcccctctatcatgctaagagaaagagaacttaaaagattggcttgacaccagaaaagaagtcatgttaacactggtttaatgttctttgagcaataaaaatttataggcctgccacatgctgctacaggaccagaataaaactagggagaaagatactggaagagtctgatatgtgttcccaggagtttcagggcacagatgaacacacagactagttactgtggaagtctgaaggggtaaagctggctggattgtcctttgtctagactttaaggaggaggggattttaacttgggcaagctacttgtccacgatttggcaccataagaatgtatgaaggtcccaagggccaagtagccatgtttgagtagtcttaataggcttacttcaaagatgacaccatgctgaaatatgacaagcaagctgtgagaagttacagaggattctgcaacagacagaaactgattgcgggtgtcaggaggtcagttggagaatgcatctataccagggaactatgcatgacaggtgtctacacaagagcattttggaggatccaccaatacactccacagaaaagccaaaactttatgcttgacataagacaatacgcgtccaaccacaagaggaatacaaacaactaaataaaaatacttttctcctacaatttaggaccctccttttggctcagcctcagaagaataagaggaaggagatatgaaagctccagaggaagaatgacgaaacagtccttgctacttttccttcggcagccttgacctccctttcaaaagagaaggcattacatttcatgagaggtgcagatacaaggctcagggaatgcagagaatagatcaccaattctgttaccttttactggagtcctattctcttctatgattttaataaaagtaccaaggaacaaatggtgaagaaacatggcttctgttcaatattccatccttattagcttgaatgtaatctcactgaaaagcaggcattaacacccaccagagcactggtggaaagcttagtcattctaagcagattctcataactctggatattgattttacattacaaaattattgatgaattgcaacagacatccagctgtattgactgtcttcaaaagtgtctggagaaatggaaagtcagtagcaacattaaacaatgttttggaggggccaactacattgtcatactgctatggcagtgtctattattctacaaacgcatatctttatttttctttagattgttggtgctcatggggctaagcaaggagaatagttaacttttttggaactttaaaattccaactgtaaaagacctatctgcaattttcagttaatactaatggtgattgtaagagtatatccaacatcagatcagatagtcatttattccttaaatgtatgccatctatagacatccattcaccaggaatttgttaagaacttacattgttcagaacagagccctcagaaataatgccgcatatgtacaaccctctgatctttgacaaacctgacaaaaacaagaaatggggaaaggattccctatttaataaatggtgctgggaaaactggctagccatctgtagaaagctgaaattggatcacttccttacaccttatacaaaaattaattcaagatggattaaagacttaaatgttagacctaaaaccataaaaaccctagaagaaaacctaggcattaccattcaggacataggcatgggcaaggacttcatatctaaaacaccaaaagcaatgcaacaaaaggcaaaatagacaaatgggatctaattaaactaaagagcttctgcacagcaaaagaaactaccatcagagtgaacaggcaacctacagaatgggaatttttgcaatctactcatctgacaaagggctaatatccagaatctacaatgaattccaacaaatttacaagaaaaaaacaaacaaccccatcaaaaagcgggcgaagtatatgaacagacaattctcaaaagaattgcagccaaaagacacatgaaaaaatgctcatgatcactggccatcagagaaatgcaaatcaaaaccacaatgagataccatctcacaccagttagaatggcaatcattaaaaagtcaggaaacaacaggtgctggagaggatgtggagaaataagaacacttttacactgttggtgggactgtaaactagttcaaccattgtggaagtcagcgtggtgattcctcagggatctagaactagaaataccatttgacccagccatcccattactgggtatatacccaaaggattataaatcatgctgctataaagacacatgcacacgtatgtttattgcgacactattcacaatagcaaagacttggaaccaacccaaatgtccagcaatgatagactggattaagaaaatttggcacatatacaccatggaatactatgcagccataaaaaatgatgaattcatgtattttgtagggacatggatgaagctggaaaccatcattctcagcaaactatcacaaggacagaaaaccaaacaccacatgttctcactcataggtgggaattgaacaatgagaacacatggacacaggaaggggaacatcacacaccggggcctgttgtggggtggggggagggggcagggatagcatttggagatatacctaatgttaaatgatgagttgctgagtgcagcacaccaacatggcacatgtatacatatataactaacctgcacgttgtgcacatgtaccctaaaatttaagtataataaaaaataaaaaataaaaataaataaaataaaataaaaaataaaaaaagaacttacattgttcagcaattctgccaacaatcagggactctgtgaagaataagctctatatgacttcagagaattcctagccttattggaaagccaaagtaaactgtaagtttgattcagtgtattaagtgctatataaaaatatacaaaaaacactcagtatttattcatctcttatgcatctgtgaggcattgacatcaagttgtccaccaaagaatcatgttgtgctgttgtaaggaagagttatttttgggaagaagctacccatatagatgctacatttcccagtcacactcagacataagtaagaccatgtgacctgtccaacagaatatgggcagaaatcatgtatgccccttccaggcctggaccattaaaatctatcattatattctccattaacccttatacatatgaatacacaccactaccatcaccttatataaatgtgtgtgtatatgcatataatatatgcacacaaaccagtggaaacttgaaagttacatattgaaaacggcaaatattccataactctggtccctgaattattgtataaagcagagcctaccctccctcatcactggttacattatggaatgagaaataaatttctatatcataaaacaaccaagatttgggggtttattacttacagttgctcctgttaccattactaatatacccaaagcattagttacaaatgcttgatgtgattaaccttttaagtcaacaacaaccctatgaagagaatactgtaactatctacattttaccagtgagggaactgaggcccaagagaggcaatgccatttgctcaaggtcacagaactagtaaatagtcaaggcactttattactgaggaatggtaaagaatgaagtcattacagaccctgaccttgaagaggtttcaatctcaaggcacagaaaatatggatgtacaaagtcctaaatataaaaataaaaagcctaaacaagaaacaaaatctcatctgtgtatttccagatcgcccccaagtgcttaaaaaatttgatgataagccaatgataaaaagttagagtaattataaaatatcatggcttggaaaaaattaattcagaaacaattaaatgatttaaaaagttttgaattaacagaatatacattttaaaacaatgtaattttaatgttttgtaagagctcagataatattaggtgttttataatctgttctaaattcaatattatttcaataaaagtattttaaactaattgaaccaaatattgaatatcaaaatttttgcttaattacataaccatttgtttatagatccatatttaccttattcaaaaaaagaggaggaatctgaggcagcttacagaaaagtaagcgatgaaaccatacaaaattttaaaataagtcagaaaattggtgtgaaaaagcaatgaaggcaaaaaaataagtcaaggacaggattgacgcaaaaaattataatgtcttgtacactttcatgaaatgaggtatacttagatttcatttcctggggcaaaaatgaaaatataattaattactagattcacaatattactaagaggaagtccagcctttcttagcttcagacatgaaggaaatttattttgaatcctcacgtagaagaaactatgtaatataacaaaccgaggcctcaatacaaggcctataagacatacatttacaaagtccatatggctgttttctatataacatccctcagttctaactttgatgccatttcaaaaccccgatcagcttatttaagacagttacaaaaggagccgaaataaagcagtcctgggacacagacttctagtggcctaagtctgaagttcagttatttcattccatctgcttattggtagatgatattgcctgcttggaacatggccagattagcctgacagccttgacagaagcctgtagttattgactaattactatggactggagagagggataataggaggaggaatagagattccaatccctgagaaaagaaattaggacccatggtgaccagacaaaaatgaataaagcaaaactgctgacaagagaatttatgtaaaggtaagcatataataataacaaacaacaaaaacaaatcaccatcatcttatattccccctttctatagaaagaatgaataagccactgaaggatcatggcatatattttcaattagttgttattgaagaagaggatttgctgtccaactccactcctttccttgcaatttgcagcaaggggtagggatataatgatgaatccaagtgctgttaatttaagtcattttatgatcttagctcatttgtatacctgattgcattttatgtcaaggatcaggaatgaagtctcatagccacaggaaatatggtagaaactccaaaggggagctacgtgggatgagcggtgtaggtcaggcaagcagctattagagaatgtgcaggcatacctaattagaagtgtatttaatgactcaccttaaaatatattgtccctcagacccattgctctaaaccttgcttcttttgaggctttagtgctaagaaagaatgctaataaggaatccagattgtgacgagataatggttttactataatggaattggctttaattcttaagggaaagtagagttttgaggtaccatggagctggaatagtgctgtaagaacccaggggactccatgtaaaactgcagcaatagcaaaataaatagaagactacctagggctcatctctctcaggaaagaaggttgggatcatccagtgagaaaagaaccttatcgactagaagtgatggctaaaggcatcaacgaatcaatgaacaaggaggaaagccagacctaccagctgttcattcattaatttgttcagtatatttattgaatatctactttgtgccaggaactattctggttatccttacagaaatgagggttatgtattaaatttccttttctcatacactatcagaatatctgaatctgaggtacactctgaccttcttgtgtcatttttaatagtctccttttctataaagggattttaatttcaattgttttggttagcttaatttttgcactagtgacagtttgccatcttatcctgaaagacgcaatattaagatggaattatgacacaatcaggagataatacgagcaatgagattggacaacagttttattttactttttttttattattattatactttaagttttagtgtacatgtgcacaatgtgcaggttagttacatatgtatacatgtgccatgctggtgtgctgcacccattaactcgtcatttaggattaggtatatctcccattgctatccctcccccctccccccaccccacaacagtccccagagtgtgatgttccccttcctgtgtccatgtgttctcattgttcaattcccatctatgagtgagaacatgcggtgtttggttttttgtccttgcgatagtttactgagaatgatgatttccaatttcatccatgcccctacaaaggacatgaactcatcattttttatggctgcatagtattccatggtgtatatgtgtcatattttcttaatccagtctatcattgttggacatttgggttggttccaagtctttgctattgtgaatagtgccgcagtaaacatacgtgtgcatgtgtctttatagcagcatgatttgtagtcctttgggtatatacccagtaatgggatggctgggtcaaatggtatttctagttctagagccctgaggaatcgccacactgacttccacaatggttgagctagtttacagtcccaccaacagtgtaaaagtgttcctatttctccacatcctctccagcacctgttgtttcctgactttttaatgattgccattctaactggtgtgagatggtatctcattgtggttttgatttgcatttctctgatggccagtgatggtgagcattttttcatgtgttttttggctgcataaatgtcttcttttgagaagtgtctgttcatgtccttcaaccactttttgatgaggttgtttgtttttttcttgtaaatttgttggagttcattgtagattctggatattagccctttgtcagatgagtaggttgcaaaaattttctcccattttgtaggttgcctgttcactctgatggtagtttcttttgctgtgcagaagctctttagtttaattagatcccatttgtcaattttggcttttgttgccatcgcttttggtgttttagacatgaagtccttgcccatgcctatgtcctgaatggtaatgcctaggttttcttctagggtttttatggttttaggtctaacatttaagtttttaatccatcttgaattaatttttgtataagatttaaggaagggatccagtttcagctttctacagatggctagccagttttcccagcaccgtttattaaatagggaatcctttctccattgcttgtttttctcaggtttgtcaaagatcagatagttgtagatatgtggcgttatttctgagggctcttttctgttccattgatctatatctctattttggtaccagtaccatgctgttttggttactgtagccttgtagtatagtttgaagtcaggtagcgtgatgcctccagctttgttcttttggcttaggattgacttggtgatgatgcgggctcttttttggttccatatgaactttaaagtagttttttccaattctgtgaagaaagtcattggtagcttgatgggtatggcattgaatctataaattaccttgggtagtatggccattttcactatattgattcttcctacccatgagcatggaatgttcttccatttgtttgtatcctcttttatttcattgagcagtggtttgtagttctccttgaagaggtccttcatgtcccctgtaagttggattcctaagtattgtattctctttgaagcaattgtgaatgggagttcactgatgatttggctctctgtttgtctgttattggtgtataagaatacctgtgatttttgtacattgattttgtatcctgagactttgctgaagttgcttatcatcttaaggagattttgggctgagacaatggggttttctatatatacaatcatgaccaccgatcccacagaaatacaaactaccatcagagaatactacaaacgcctctatgcaaataaactagaaaatctagaagaaatggataaattcctcgacacatacactctcccaagactaaaccaggaagaagttgaatctcttaatagaccaataacaggagctgaaattgtggcaatagtcaatagcttaccaaccaaaaagagtccaggaccagatggattcacagccaaattctaccagaggtacaaggaggaactggtaccattccttctgaaactattccaatcaatagaaaaagaaggaatcctccctaactcattttatgaggccagcatcatcctgataccaaagccgggcagagacacaaccaaaaaagagaattttagaccaatatccttgatgaacattgatgcaaaaatcctcaataaaatactggcaaaccgaatccagcagcacatcaaaaagcttatccaccatgatcaagtgggcttcatccctgggatgcaaggctggttcaatatacgcaaatcaataaatgtaatccagcatgtaaacagaaccaaagacaaaaaccacatgattatctcaatagatgcagaaaaggcctttgacaaaattcaacaacccttcatgctaaaatctctcaatcaattaggtattgatgggacgtatctcaaaataataagagctatctatgacaaacccacagccaatatcatactgaatgggcaaaaactggaagcattccctctgaaaactggcacaagacagggatgccctctctcaccactcctattcaacatagtgttggaagttctggccagggcaattaggcaggagaaggaaataaagggtattcaattaggaaaagaggaagtcaaattctccctgtttgcagacgacaacagtcttttttaaggagggtcaggaaattacctctgcatgcgctaactagatgtgacttcaagttgccatcctattgaggaaggaaagagcatgttgccattatgcacaagaaagttgtagtgctagtaaagagcgtcattggaggtctgtaatcacaaagaagggaactgtgtgacctggaagctaggggtgaaaggcatggacaagaagcctcaaaaaaatcttgctgagaaatgaatactcagaaagtaccctgtggcgagccaaatcttatgcttcaagctaaatcatattggtgcctttttcaaaattggttggactagggagagtttcccagtttagggaccaccaatgaaaaactgatccatattcagtgatggttaatcaacccaacttgcctggaaactaaagatgtgaagtagaaagcaaaacagacacacctgaaaggacatcaagtgcattactggaatgactaagcactagaacggagaagcttccatattctcgctttgtgcaaataaagtagcacaactctcacaaaatgaaaggggctcaactaatacagtagcatttggcagacaggtgtcccaaagccttagaaaatatactatgtggtataatatagtaagctcaggacttgatgtcaggaacatgagttggagaagtagtcaacttgcatactacgtttgtgatattttccaaatatatactctgaacattttatttattaggaaaacataatttacacttcttatgatgctcaaaagcatgtggattttgatataatactgaagattcttaagacagaaaattatacatgccaagcacaagcaagaataaatgttacaatgttatgttaaatggaagagcatacaaagtaatatattcaggatgattgtcactgggggaatatagaaacatatggaaaactgaaagagaatactcaaaaatggaagttatgatagagtcatgggattttatgcattttttatttttagaaagaaatcaatattgttttatattgttataccaaaacttagactaaaataatgtgtatagaaatattggccctcacacagaaagaatgaaatggttaaatggaaaaacccctctggtgctgtggacatgtgagtttttgttttgtttgtttgtttgtttgttttttgagacagagtctcactctgttgcataggccggagtgcagcggtgcaacctgggctcactgcaaactccgcctcctgggttcaagtgattctcctgcctcagcctcccgagtagctgggattacaggcgcacatcaccacacccagctaatttttgtatttttagtagagacggggtatcaccatgttcgccaggatggtctcgatctcctgaccttgtgatccacccatctcagcctcccaaagtgctgggattacaggcgtgagccatcgcgccaggccgagatttttaatagtataaaacagtaagataggagaaagtcaacagttttcagaaggaaggtgttttcaagatggacccaacctgaaacactttactttcatccatacctgttgcttcagttcaagtcagagagaacacaaaacagaaacaccttggacaatgttgagcaccagttctgtcaggcattatctttagacacaaagatataaacaacagagaataagcagacttgctgcttgcccacacagagattctacagggtttttttttttttttttttttggtactatgtatatgctatggtttgaatgagcagcatcctcttcaaaactcctgtgttgccaatgcggtaagaggtggggcctttaagaggcgattaggccctgagagctcctttctcatgaatgggattaaagttcctatacgtgaggattcatgcagcattaggtagcttgcccttctgccttctgccatgtgaagagccttcaccagacaaccaaacctgccagtgcccagatcttagatttcccagcttccagaactgtgaggaaataagttctgttctttacaagctacccagtctcaaatatttgtgctatagcagcaaaaaattgaaaaagacagtgtatgaaagaagagagaaaccccctaccttctttatagatagaaatacacatggccaaatccatggagacaatcagtgatgacactctaaactctgaacttgcagcaatagcagagagaatagacactgaaaattatctagctttaatactaattctagggataaaaagctgtaaaaaaaaaaggttgtatagaatataaatagcacataatgcagaaaggatcaatggaaaatgtagaataaaaataataattttctaaatgtcgtaacagaaccaagaatgaaatgccacccttcgctctgttctacttttaatttaaccaattcctccaaaattgttgatggttaattaaatatgaggcttctaatactcaagggcttttctttcaagaaactaacatctcatggaaccctgatgtcctcagccagttggaaccaagaacaacctcattttgatgaaaatgcagtgaattcattggcatcagggaaacttcagaagtacaaggattccaatacgtacatcagcaaatatgaaaagcctagcaatacaagaagagtaaagaatatgccttcaactatttagctggagctcaatatttcttaataggtaaaacattctaagatcaagagaatgaaggatagaatgaaaaatgctggatgttaaggcatgtacaaggaaacaaaaagcataaaacactatggaataaatttaacaaaagtgcaaaacatattctgaaagctacaaaacattgttttaagaacataaaaaagaactaaaacatggaaaagtatttcatgtttctggattggaagtattaatattgtagagatgacaataaccctcaaacagatctacagattcagcacaatccttatcaaaatcccagcagcctttttttgtatcaatggacaagccaacactaatccagtttcattgcaagggaccccaattacataaaacatccttaaaaaaatgaacaaagtaggaagattcatatttcacagtttcaaaacttactacaaaaatacaacaattaagacagtgtagtattaacacacaaattgacatatagatcaataaaatgaaattgaacgttgagaaaagaaattcccatacatttgaggtcaattgatttttgacaagagtgccaagacaattcaatggagaaagaatagtcttttcaacacattgtgccaggacaacctgatgtccccatgcacaagaattaagttgaatttcttccttacaccataaaaattaattccaaatggatcaaagacctaaatgtaagagctaaaaatataaaactttttgaaggaaataggaacagactttgaccttgagttatgcttagccttcttagatggaaaaccaaaagcacaattatttttaaaaagcataaataaattggacttcatcaaaattaaaaactcttgtgctttgaaggccatcatcaagaaagtaaagggacaaccgaaccatggaatgagagtatttgcaaataatatatctgatgaaggattagtatcaagaatatacagggaatgcttgcaactcaaaaataaaaagacaaataacctcaacgaaaattgggcaaaatatatgaatgaatattttgtcaaagaaaatatgcaaatagccaataagcacatgggaagatgctcatcatcattagcagttaggaaaatacaaatcataaccacaatgagagtctacttcacacccattaggatgactataataaaaaagatagtaacaagcatttgcatggatgtggagaagttggaacctttatgctgttgtaatacaaaatggtgcaaccactatggaatacagtttggcagttcctcaaaaagttaaacagttaccatgtgactcggcaattccacttctaggtatatgctcaagataaatgaaaactaatattcacacaagaacttgcataccagtgtttataacagcattattcttaatagctaaaaagagaaaacactcaaatgtccatcaactgataagtgaacaaataaaaactggtgttaccaagccttctggtctgtctctggaggcaggaaatgccagggtgcaaccagtcaagctactgcccaacgctcatcaagagaatagttatcttgtagggcagctctggttctagtgtctggcagtggaattaaacagccaccatgttgacaaaaggacaaagaccaaggccaccaagaagcactctccaaacgtaatattcagtgtgtttgccacattggactaggcacagattcaggagttcaaagaggcctttgacattattgatcagaatagagattctttcaacaaggaagatgtgcatgatatgcttgcttctctcttcatcagaatccaactgatgtataccaagatgctgtaaggagtgaggttctgggcttataaatttcaccactgccctactgtttggtgagaagttaaatagcacatatcctgaagatgtcatcagaaatgctttagcctgctttgataaagaagcaacaggaaccattcaggaagactatttgagagaactgctgacaacaatgggaagtgaatgagctgtacagagaaggtgctattgacaaaaaaggaaattttaattacattgagttcacatgtagccttaaatatggggtgaaagacaaagatgattgaaacatcagctaaaaccacgaaattattgtatcttatgctatttcctggatactttgccccatcatcatagaccctgctgcatgtgcttagttttatagctttgcctttttaaatatacttatttcagatctttttgccacttagcacttgtataatcagactgtaaatggagatgaagttgtacattgtattgaaaaaaagattactaataaaaatcaacatatacaaaagctcaagagaatatatctgtatttctggttttactggattgttgttacatttttatataataaaaatgcaattttaaaatgcgtgaaatattaaatataaaaatgagtatattcatataatggaatattgttttgcaataaaaaggagtgatatactgatacattttccatattaaaccttgaaaacattatgctaagtgacaaaagatcacataatgaatgaatgtttttatattaaatgtctagaaaagaataatttatagacacagaaaatatgcttatgattgcctaggtctcaagaaagaagtgaatggggagtaacagatatggagctttcttctcggaatgatgaaaatgttctataaagtattgtgttgatggtcacacaactctgtgaacacacttaaataggttaattgtatgatatgtgaattatatctcaataaagcagttaaaatacacataaagcgaacctgacaaagcaattgtcatgatagaaccctttaatactcttgtagtatggataaaaaataaagaacacagaaactctgacttatatcattaatacagttacgtaatttaatagatacatagcaatctctttaccctacaaatgtggaacacagtcttccaaatttccccagaacatgtagtaaaattagtacatacaagaacaagataaggaaacctcaaaacattttgaaacaaaaaaaatcaaatgagtatatgcataatgcaataaatttgaaataaaaagaaaatattcaaacaaaaaatgaattatcttaaaataggaaagacttcttagagtaataactggttaaaaaaagaaatttaagctgattttacaaaatgaatacaaaaacaataccaaacggaatagtttatgtcaaatcatataagatatggactataattaatgttaccattaagaaagaaataaaaataaattaagcattgagctcagtaatttataaaaactaacatcaaattatactagaaacacaagaaaaaagaactaataaagagaatgcaaacacccaaatgtaggaatatagaaaggaacacaccattatgcaggcctatatttcaaacagtttaatagtgtctataattctatgcttatatattcttacaattgccattaaatgcaccgttttccaaaaaaaaatgaagaccattgacactatatcataaagatgaaaaaactagtcaatgtagaaggaattgagaaatatattcaaatcaattattgtgtctaagattgttataagtgaatctttgcaaatctttaattagcagaaaatccaaatattaaactactgcagtgcaaataaaaaagatgtaacacttctcatttcattatacaaagctagcataatcttgatagcaaatttaagatagcacaaacagaactaaaatatagaccaattattatctaaaaactcacataggaaaaccctaaataatagcaaattgaatccataagcataattaaaactgtaatatattatgacaacgttggctttattacataatgcaaaagtagtttagtagaaaaacctgctattgtaattcattaaatcgatagatccaaatagagaaatcatgtgactatcctgatactaaagacatttgataaaatccaacatccattcctaataatccttacgcttaatcatgtaaagaactcaaactgataataagtgtcctttttaagattctaaagtatttctcttcatagcaacgagatattactacacatgattattactattatttgaaacttattaaaatagaaaaatggtatatatatgaaaaacataaaaatgagcaagaactaggttaaagcaaaagtattattgtttttaacatgatgtggaaattttaaaatttatgaaatttattaaaacaatcaaatttttaaaggtgttcttaaggttgtcagatgcaaaataaagacacccaatctaatagtctttttataaatgagaaataaccaattgaaacaaaatcttatttacaatagcagcaaaaaacccacaacatgcctaggaattaactaaagactagagccatgtagattcaatataattaaacctattgatctttcttgggagatacccatgaagttttaaatatttggaaacacaaatgaggcttgtgaatgagaaagcttaaaatattggaagatgtcagttttcctccctcgttatcatcaatgattctgaaatagcatcgcaatattaatcaaaattccaaaaatatttggagagagaatttaaaataattttaaagtttactgggaagaataaacatacacattaaaattcaaatcttcacatcgtaagtttctaatatccatccccatgtggctctttgctcctttttggcatatggaaagatgatatttcccccatcctttgcagttaggctgactagttctggccaatcaagtgtcagtataggtaacttgtctcacttctggacataagaaaggaactgccattataagaacttccagctctctccctgacacaggaattgttgtgtagaatttgtgctgagatggcaaagccacaaattcaaaccagcctaggttgctgagtgattgagtagaggacaagtatcctgaagagccatttgaacccacaacagactctaagtggaaaaacaaacaaacaacaacaacactttgtggcattaagccattgagatatggaggatgttaatgcagcataatttagcctgtgctaactaatgaacttctgggtaagaaaaacaggatctttgcttttgttgcaattgcttttggcatcttcatcatgaaatctttgcctgtgcgtatgtcctgaatggtattgcctcagtcatcttccacagtttttatagtttttcattttacatttaagagtttactccattttgagttaatttttgtatatggtataaggaaggggtccagtttcaattttctgcatatggctagccagttaacccagcaccatttattgaaccagttatcccagcaccacttattgaatagggaatcctttcccccttgcttgtttttgtcaggtttgtcgaatatcagatagttgtaggtgtgcgatcttatttccgggttctctattctattccactggtctacgtgtctgcttctgtaccagtaccatgctgttttggttactgtagaaatgtagtatagtttgaagttgggtagtgtgatgcctccagctttgttctttttgcttaggattgcattggctgttcaggctgtttttcattccacatgaattttaaaatagtttttccttctagttctgtgaaggtcaatgatagtttaacaggcataccattgaatctataaattgctttgggcactatggccattttgcaatattgattcttcctatccttgagcatagaatgttttttcatttgtttgtcatctctgatttctttgagaagtggtttgtagctctccttgtagagatctttcacctccctggttagctgtattcccaggtatgttattctttttgtggcaactgtgaatgagaattaattcctgatttggttctcagcttgattcttgttggtgtataggaatgctgctgatttttgcacatggattttgtatcctgagactttgaatcaatgttagaccagataaaaaaaaatgtcatacatatacaccatggaatactatgcagtcctaagaaagaattagatcatatcctttgcagggacatggatggagctagaggccattatacttagcaaactaacacaggaacagaaaaccaaatactgcacgttctcacttataagtgggagctgaatgatgagaacacatggacacatagaggggaacaacacaccctagggcctattgtggggtgggaggaggcagaggatcaggaaaaataactaatgggtactaggcttaatacctggataatgaaataatctgtacaaaaaccccccacaacaaaagtttacctatgtaactaatgtacacatgtacccctgaacttaaaataaaagttaaaaaaaaaaaaacagaatcactgtaaacaaatacaaaaggcaccccaggctgacaaaggaccataaaaatgagcaaagggcatcataattgcagtttacaaaaaaaaaccataactggtcgataaatatatggaaaaaagattaaaaatgcaatgccatttcacatttcttttcattggatgaaattaataagactggtgaaattaagttttggaaattatgtgaaaaaataaaaaaaaattgcttatgcattaatacaatcaattcagagtaattttaccacatccaataatgatgaaaatcaatataacatacaacccaggagcaattacactttaagctgcctaaagattgtcttacacatgttcaaggagatatgtacatgtatgtttatggcaatactattggtattactggaaaggaaaaagagaagaattactaagaaggaatctaaaaaaaagtggtttattacttaaatggacctatatgtgtatatgccattatgactaatatcaataatctaatgtcgagtgaaagaaaagttacaaaagaacacatgcagtttacacattatgaagatggcattgaccaaaaataatagaaaatgcttacacatgttgttctatatctctatgaactattgctatgcaataataaaaatgaactattaaaatctcagcaccgtaaacgaatctcaaaaatattatcataaatgggccgggtgcggtggctcacgcctgtaatcccagcattttgggaggccaaagcggacggatcacgaggtcaggagatcgagaccatcctggctaacatggtgaaaccccgtctctactaaaaatacaaaaattagccgggcgtggtggcaggcgcctgtagtcccaactactcaggaggctgaggcagaagaatggcgtgaacccgggagacggagcttgcagtgagccgagatcctgccactgcactccagcctgggcgacagagcaagactctgtctcaaaaacacaacaaaacaaacaaacaaaattatcataaataacagaagccattcaacagaagaatgcttactgtatgagtccatgaatatgaagtttggacagataagagtcatatgatcctagaaatcaaagcatttgctacctttgtagggcaggagttaactgaaggaagacacaagggtcttttcaggtaaagaaaatatttcctttcttaactagaatgatgttttcacaatttatatacttataaaaactcatgaaattgtacattttaaaaagttgagtaaataggaatagctgttaattatttgaataatgataattaatagaaaaactaaaaataatgtacatatcaaacattagaggtgaacgggggaactggaaagtagtgaatataaattaagtcaccttttttattgagaatccataatattgcctaatattgataagcttgtaaacatatatattatctatatatataggttatatatagtctccctttttatcttatatgttatatatcttaatatatatctatatattatatatattatctccttttattttatatatatatatatataaaatctccctttttagtaataccaatagtgttgccatgaacatacatgtacatatctccttgaacgtgtgtaagagaatctttacacagcttaaagtggaattgcccctgggttgtaggttatattaattttcatcatagcattataacatatattacatatgtaatagccatgatgataatcaagaaaagaagtataagtatttataagtaacaccatttaaaaatgtattcttctgaactgtgaaaagggaaaaggctgaagacttatattgtatgctttgatttgttaccatgtacatctattattttgagaatttttatgtggtagaataatcatttttagaaaataacagttaataaatatgtttaagtcaaaaattgcaatttacaaagcagtgttatgatattataccatttttattaattatgttcgtatgtgtgtatatttatctatacttacaaagacagaattcaaatatatacccaaatgttaccatggttatctctaggtattagaattagaggcaccattcatttttgtttctattttatgctcttttcatttttctactagattttatttaaacaattttattccagggaatcttatgccattgatttcaacatgctaatagtcagaagcatcatcaaatagcaatatttactgagcccttactgtgtaccaagctgtaagctgggctttgagttggactagacaagctctctgctctgaaggagcttagtctagtgtcagatacagatacacgtgaatatgatataatttttccctagggctgtaacagagtcagggatgtatgaggtggtattttaatttaccttttgtaaatttaccagtagaaatttactagatggataatgtgagaaagtaatcaaatttgggtgctgcttccagaagtcacaagatatgcaaaaagcaggtagctgactacttagtttgatacactgtgggaaaaattcaaatatcaagagaatgatctttcattcttttgaagcacaaaagtcctctgacaatcctatatgcaggctaagtcatttgcataatctctattggaaaattcttacttcaccagggatagcatatgcacaaattacaaaaaaagactttaaatttcatatggaactaaaaaagagctcatatagccaagacaatcctaagcaaagagaacaaagctggaggcatcatgctacctgacttaaaactatactacaaggctgcagtaaccaaaacaacatggtactggtaccaaaacagatatattgaccaatggaacagaacacagacctaagaaataactccacacatctaaaatcatctgatctttgacaaacctgacaaaaataagcaatggagaaaggattccctatttaataaatggtgttgggaaaactgctagtcatagtagaaaactgaaactggaccacttccttacttcttatataaaaagtaactcaagatggattaaagacttaaacataagacctaaaaccataaaaaccctagaagaaaacctaggcaatattatcattcgggacataggcatgggcaaagacttcatgactaaaacgccaaaagcaatggcaacaaaattggcaaaagggatctaattagaccacagagctcctgcaaagcaaaagaaactatcaacagagtgaacaggctacctatagaatgggagaaaattgttgcaatctatccatctgacaaagggctaatatccagaatctacaaagaacttaaacaaatttacaagaaaaaaacaaacaaccccatcaaaaagtgggtgaagtatatgaacagacacttctcaaaagaagatatttatgtggccaacaaacatacggaaaaaagctcatcatccctgctcattagagaaatgcaaatcaaaaccacaatgagataccatctcatgccagttagaatggcgatcattaaaaagtcaggaaacaacagatgctggagaagatgtggagaaataggaacacttttacactgttggagggagtgtaaattaggtcaaccattgtggaagacagtgtggcaattcctcatggatctagaaccagaaataccatttgacccagcaatcccattactgagtatataccctaagggttataaattattctactataaagatacatgcaaatgtatgtttattgcagcactactcacaatagcaaagacttggaaccaacccaaatgcccatcaatgatagactggataaaggaaatgtggcacatatacaccatggagtattatgcagccataaaaaaggatgagttcatgtcctttgcagggacatggatgaagctggaaaccatcattctaagcaaactaacacaggaacagaaaagcaaacactgcatgttctcactcattagtgggagttgaacaatgagaacacatggacacaaggaggggaacatcacatactggggcctgtcaggaggtggggggctaggggagggatagcattaagagaaatacctaatgtagatgatgggttgatgggtgcagcaaaccaccatggcacatgtatacctatgtaacaagcctgcacattctgtgcctgtatcccagaactttaagtataataataattaaaaaaacaaatttccttatatgccacgagactgatacatgctcatatagataacttttcatgtttaccaaaataactttcagttaagccctagtcccctaatgtgtattgtttgtgtattactttcctatggcttctgtaacaaattaccacaaacctggtggcttagtgcaaaagatacttattttctcataattctagggaccagaagtctgaaatcagtatcacttgatttcaacccaaatcaaggtgttggcagggccattctccctctaaagaataagctgtttcttacctcttccaccttctggtggctgctgctggggaattattatcaagattaattaataagttgattttatgtagtttattattcaatctagaaaacaagaaataaggacattgttccttgtttttgcttcccctatatacctacttttattttatttttcaaaaacagcgtctcactctgttgcccaggctgcagtgtggtggcacaatcttggcttgctgcaacccccacctcccaggttccagcgagattcttatatctcagcctcccaagtatcttggactacaagcatgcaccccaatgcccagccaattttttttatttttggtagggatggagtttcaccatgttggccaggctcactgcaacctccacctcctcggttcaagcaattctcctgcctcagcctcccgagtacctgggactacaggtgtgtccacagttggttccttccagcgggttcttggtctcactgacttcaagaatgaagccacaggcctttgcagtgagtgttacagctcttaaaaggggcacggacccaaagagtaagcagctgcaagatttattgtgaaaaccaaaagaacaaagcttccacagcctggcaggctaccgaagcagtcgctgctcctggcttgggggtggccaacttttattctcttatttgtccccgcccacatcctgctgattggtccattttacagagtgctgattggtccattttacagagctctgattggtccattttacagagtgctgattggtccattttacagagagctgattggtccactgtacaaacctctagctagccacagaaagcagattggtgcatttttacagagcactgattggtccattttctaaatctctagctagccacagagcactgattggtgtgttttgcaatcctagctacagagtgctgattggtgcattttacagtcctcttgtaagacagaaaagttctccaagtctccacccgacccaaaggtccagctggcttcacctctcacaggtgcacggcaccacactggcttaatttggcctctcaaagtgctgggattataggtgtgagccactatgccaggctatacctactttatataactgctcatctcttttaggtgaaatgtgtggctggaaacaattttgtgatcttgctgcatatgtagttcttctttttcatttttaattatctgttctttttttttccaaggttgcctgtaaacatcacttaactattacaattattattattattattattattattattttgagatggagtctcactctgtcaccaggctggagtgcagtggcgtgatctcagctcactgcaacctctgccttccagcttcaagcaattctcctgcctcagcctcccaagtagctgggactacaggtgtgtgccaccacgtccagctaatttttgtatttttagtaaagacagggtttcaccatgttggccaggattgtctcaatctcttgacctcatgatctgcccacctcggcctcccaaagtgctaggattagaggcgttagccaccgcagctggcctacaattatttttatagattacttttacctgttggttactttaaaggactcttcattctacagcttttctcttctctttacttattttttagagactttaaaattaacttttatagcaaagcaaatatttccatgaattataaaatggatagaaatagtatcatcaagtgcctctgttctataaattatgatcaaaggaatctatttgaagcaaattatattttaattgtctctagttatgtttttatatgcgactgattaaacatttttatttgtaatactaaattttttcaaatccaaatgttatttttaaactttattattacttctgtcttttcattggcattggcatattatattgtaactatttcatttgattttaccatgaatacatagttttttaattacattctaaaactgattatgttgatataggagcatacagttaaatttgctacatatgaccattttattatatatctcatggtgttgtttgagatttgtagttttgtgtattacttagcactgtagtcagaatgtttctgtctacccaaaattcatataatgaaatctaattcccaatgcaataatactaagaggtaggacctataggggccaattagataattagggtagatccctcatgatgggattagtgccagtataaaagtggctgaaggaaacttgctttgccatctgaggacacataaaaggcactatctatgaagaacatgttcttgccagacacagaatctaccagttctttgatctcgggcctcccattcctcagaactgtgagcaataaacttcttttttttttttttttgataaattacccagtctaaggtactttgttatagcaactcagactatgacattgtgttaggttgtttttgcattgctataaaggaataattgagactggtatttataaagaaaagagatttaattggcttacagttctgcaggctgtataagcatggcaccaacatctgcttggcttctggcaagggcctccggtagcatacaaccatagtgaaaagcaaagcaggagcaggcatgtcacatggtgagggcaggaacaagagaaagagaggggaggtgctacgtatttttaaacaatcagatctcacatgaactcagagggagaactcacttatcaccaacggatggcactaagccactcatgagctattcatccccattatccaaacaccttccaccaggccccacctccaatagtaaagattacatttcaatatgagattttgaggggacaaatatccaaacatatcaaacacttagtaacacaaatataaaatagaaactactgcctgttgaaggaaggcatttgtttttcattgctttttagttccaactaaaactctttttttgctttttcttctttttttttttgttttgttttgttttgtttttgagacggagcctcactctgtcacccagggtagagtgcatgtggcacactgcaacctccacctcccaggttcaagcaattctcctgcctcagcctcccgagtagctgagactacagccacacatcgccacactgccttaattttttgtatttttgtagagacggggtttcaccgtgttgcctgggctggtttggaactcctgagctgaggcaatccatccaacttggcctcccaaagtgctgggattacaggtgtgagccaccatgcctggcccagttccaactaaaattctaacgtggactttaagaagcctaacaaatactattgatcacagtatgttacataatagatcttaacttgattttcatttcaaaaagaaaagccatagaactacttatttagagctacaagcgttagcctaattcctgcattttaaataagacctacaggatgattttcatacaaatcagttgctactgctcaattatcttcatttatgtgtatcctacccctttctacctccaatgttaaggatgtaccatttagaaaaaactgcttcattcttttttttgaatacctcgaacatacctcatttattgtattgttcaagagataataggtcttataaaatgactagcaagctcatattttgctaaattacccagatccaattatattttatacttttttaatagtgttaaactttttaaataatattaaacttatattatcttaataggccaaaacaataacaagtttttaaaatagtgatttaccgcatattatggaaaataatgggagctgcttaaatttagctcatgtcatatgctagaatctagtaatcatcttattatagttacaaatcaaagtttacccatttattttacttatattgcttaacatgaagaacacacacaaattataaaaaataacttaaatgactaaataaacattggtaatgtaaacattttatcttgttaatttattgtctatgaatattaaagaaagcatgttgattttttgttgcatctatattttttcacttctaaactttcagttgcatccagttttgattatttaagatcttaaaaaatcttgtccttagttccctttttatgtgtacatacaagagaagattatgccattgtaattcagttaggctttcccaatctgctgaagtaaatttttctcattatctattgctaactagctgtgatctgcccgtgaaaggaattgttcagcatattcagcatacgtggatcagcaaaccaatttataagttctattgagtaatattttttgcttaagcctaatagaacatcagtcaaggacccaaacgaatggagatagattttggtggactttgctgtccctttctttccttgtttctttttctctctaaaaattatcttttacatattaaaactgaaggttgttcaaagttagtttccagtttcttcattcttttatttttctggttgaatcttcaaatttacattttcttcagttttgaaaagccatagttcacagtgatccaattgtagtggtgttagattcatttataaacatgcccaacctcattcggaataaaaacaatttaaactttgggctcagagagaaaactgcaagattaactctttataactattttcagcatttgattgaaatttttgatttttgtcacatttttggaataaggacagtgtagcccaaccttgttctattatttcttttcctatggctatttattcatactaattatagatgttccatgattatatttactttaaaatatgaagtatctgaagaactcttacaatttcttttttttttcttctggtagctcttacaagatccatgtggttattcaagacacaaacaagtatgtccctacaataattcatcttgtcggcttattttaagtactttaaaatttgaacgttcatgagataaaaaatatgaatttcatttttgcatcagggtctcactctgtcacccaggctagagggcaatggtgtaatcatggcttagtgcagcctcaacttcctgggtgcaagtgatcctcccacctcagcctcccaagtggctgggactgcaagcatgtgccaacatgcccagctgattattttctgtattttttatagagacggggtcttactatattgcccaggccggtctgaaacttctggactcaagcaatactgcctcggcctcccaaagtgctgggattgcaggcatgagccaccatgttcagcccattattttttaaaggaaaaaaaactttattgagctttatttatttatatataattcatatatcataaagttcaaaattttaaattgtacaatccagtactttatagtatatgcacaatgttgtatatcattcaccaccgttcaattctagaacattccctcccctcccagtcctggcaaacactagtctgctttctgactttttggatttgcatatcctggacatttcatatcattggaaccatacaatatgtggccttttgtttctttccctcatgataatgtttcaaagttcatctgtgcagtagagtatatcagaattctattccttttgatagccagataatattctattatatggatatacagtactgcattttatttattcatcaggtagttggaatccattgtttttgaatcattgtcaatcttcaatgataaaaagtctgaaattataatttggtacagagcagtttttgatatatactttagacattaaaaaatgtgtgtatgtgtatgtgtgtatgttttaatttttatatgttttaatcttgcatttcaaaactctaaaaaattattagttctaaaacactgtgattatccaaaggttttgaatgagagattatgtataatatcctaaaattaagaaggaagaggatttggtcatctgtaaaggaaaatttttaacatatccttttttcctaggtaaacattcactagacccttttttttccctctccttgtatctctaaataaaaggcatctcactgacaagaattttaattctttatctttcttccctcatctgattggtcaggatgcccagtgtgttctaccttattaatagctcccatttgttctttcctttctgttctcaccaccagaaactgagttcaactttattccatatgataacagagcgacttactttacgtgtatcagagaacttatcaatctttgtacttgtctccttccagccacaagccagtaagctcttggaaagcaggaagtgtcattttgctcttggctttcctccatagtggctggcaaagagtttgtactcaactgttggctgaaaaaaatgatgatgaacaagtggtatgaataatattagcacttaatttttttcctcttctttagtatagtgtttctcaatgtttcttagcagaaaacctcaagattttcaaaagaggatgttattatttttgagttacaaaaaatttcagaaactatactgttaaaaattatgttaaattcattttaaatataaactaatatgcataatagacactaaaatgttttcaaaaaatatggaaatcaataaatgtaatccatcacataaacagaaccaatgacaaaaaccacaattttctcaatagatgcagaaaaaatcttcaatagaattcaacatcctttcatgttaaaaactctcaaaaaactaggcattgatggaacatatctcaaaataataagagctatttatgacaaacccacaaccaatatcatactgaatgggcaaaagctggaagcattccctttgaaaaccatcacaagacaaggatgtcctctctcaccattcctattcaacatagtattgtaagttctggccagggcaatcaggcaagaaaaagaaataaacggtattcaaacaggaagagaggaagtcaaattgtctctgcagacgacatgatcctatatttggaaaacaccatcgtctcagcctaaaagctccttaacctgataagtaaattcaacaatgtctcagtatacaaaatcaatgtgcaaaaatcacaagcattcctttacaccaacaatagacaagcagagagccaaatcatgaataaacttccattcacaattgctacaaagagaataaaatacctaggaatacagctaacaaggaacgtgaaggacctcttcaaggagaactacaaaccaccactcaaagaaataagagaggaaacaaacaaatggaaaaacattccatcctcatgaacagaaaaaaacaatatcatgaaaatggccatggtgcccaaaagaatttatagattcaatattattcccaaactaccacggacattcttcacagaattagaaaaaaatactttaaaattcatatggaaccaaaaaaagagcccgaatagccaagacaattctaagcaaaaagaataaagctggaggcatcatgctaccttacttcaaactatactacaaggctacagtaaccaagacaacatggtactggtacaaaaacagacacatagaccaatggagcagaatagagattttagaaataagaccatacatctacaaccatctgatctttgacaaacctgaccaaaacaagcaatggggaaaggactccctatttaataaatagtgctgggaaaactagctagccatatgcagaaaattgaaactggaccccttccttacagcttatacaaaaattaactcaagatggattaaagacttaaatttaaaacccaaaactataaaaaccctagaagaaaatctaggcaataccattcaggacataggaacaggaaaagatttaatgacagaaacatcaaaagcaattgcaacaaaagcagaaattgacaaatgggacctaattaaagtaaacagcttctgcacagcaaatgaaactatctccagagtcaacagaacctacagaatgggagaaagtttttgcaacctatccatctgacaaagttctagtatccagaattttcagggaacttgaacaaatttacaagaaataaacaaacagcctcatcaaaaagtaggcaaaggacatgaacagacacttttcaaaagaagacatttatgcagccaacaaacatgaaaaaagctcaacattactgatcattagagaaatgcaaatcgaaacaacaatgacataccatctcatgccagtcagaaagacgatttttaaaaagtcaagaaacaacagatgctcttgaggctgtgaggctgtggagaaaaggaatgcttttacactgttggtggaaatataagttacttcaaccattgtggaagacagtttggcaattcctcaaggatctggaacagaaatactatttcacccagcaatcccattactggatatatattactgggtatatacccaaaggaatataaatcattttattataaagatgcatgcatgtgtatgtctattgcagcactattcacaagcaaagacatggaatcaacccaaatgcccatcagtgatagactggaaaaagaaaatgtggtacatatacaccatggaattctatgcagccataaaaagtaacgtcatcatgtcctttgcaggcacatggatgaaactggaagccatcatcttcagcaaactaacacaggaacagaaaaccaaatactgcatgttctaattcataagtgggagctgaacaatgagaacacatggacacggaggagagcaactcacaccagggcctatcagggggtgggggaagggagagcatcaggataaatagctaatgcatgtggggcttaatacctagatgatgggttgatcagtgcagcaaaccactgcacacatttacctatgtaacaaaagctgcacgtcctgcacatgcatcctagaacttaaaataaaattttttaaaagttatactctattataatcctctgtattatgtttatatttatgcttgttcttatagtttatatatttaattttctgagaacaaattgattttacaaggtaatgagatcaccaaaagtgtgagcacagtccacagctataaataggtcccagctaatagcaaagaggtaaacaatccacatgcaaatagtcaagaatccattctatgtatttctttaaccttctccttttctctatacagagtcagaacttcttgttctaacacaaggacttcataaaaagacatatccaaataaaaataattaaataaaatgttgttctctgtgtaaagctgctgtcgtctgtttggagagaggtaagatttctgttagaacaggtctgaatgaagaacatgagctactgagattctaggaaaaatgagtggaccatacgaagaaatgtctaaaactacagagtaaagagtaaactactcttataaaggtatttctctctttctctctctccatctttctttctctcatttactctttcccacgtgcacgtgtgtatgcacacacacacacacacacacacacattcacacaggaaaaacaataacccagcttcctattactaaagacaaaggtataaactaatgcacatggaggatctgttactgtggcaacagcaaccccatgtgctttgtttgaactcaacaaacaataaaaaatccttgaaatttcgccttcatcatcttcattgaaaacattttctgagctctgatgaatcatgaaaagcaccatttgattgctattgggttacagagtatggagaaaccaatttgtttttgttctttcaaggttatgattcaaataggaatgtcaagaccagctgaagaataatgatggggctgatttatgccgatacatcaatcacaaattctcaagaagaagaaaatgatggtacatagtttaatgcattatagacataggtattggctacagatttagacagatttatagatatacacacaaatgcaaatataagtgtgtgtgtgtatatatacatacatatatagagacatatatctatatggatacagagatttctgttgatttatagaagacatttgaaacaattgatcttcacacagccctcaaacaaacaaaaaatacatgaacatagtatcccaatagtccagaattttagagatagtagaggtatttcaaaaatattctagtctcatctttcccaaagtaataaatgtaatattataatatattattttagattatatatgtgccctttattttaatcagtgtttgtttttatcaatatattatatttatggaaaatttatatcattgctacctgttttataaagtttgtttttaaacaaatcgaagtttaaaatggattgatctgtactatctgtgcaaattttgtataactctaacactgtatcataaataaagactattaatttaaaatgatttggttgaaaggaaaacattaattaaagtatagatgatccacagttatgacaaacattataaggcaaaacacaaattactgcaggttggaaaacactgatcttgcccaaggtggtcattttgcaaacaagtagaccatgactgagagagtcgcacagttctaaggccaagtgtggtggctcatgcctgtaattccagcactttgggaggccaaggcaggcagatcacatgaggccaggagttcgggaccagcctggccaacatggcaaaaccctgtctctactaaaaatatcaaaatgagccaggtgtggtggtgcatgtctgtagtcccagctactcgggtggctgaggcacaagaatcacttaaacccaggagactgaggttgtagtgagccaagatcatgccactgcactccagcctgggccacagagggagactcggtcaaaaaaaaaaaaaaagagtcacacactgttctagattcatgttcagcctccagacctgctgtttctggtgtagagctttctctacctatcatgttgccttcttttctcattgagtcagttctttgcaactgcatcttctagggtgaatctgtattctgttccttattgttgcacagcatgcagggttagctgctttatttctccgagaaacctcacagctattgtaatatatcggagaggatcaaatccggagaaagaaactacaccagtaattgtaacagggaacacttaatttaaaaattgttaaggagtaaagagtggttaactactaaaaggcgtaaagaggatacaaaggcatagtagccactgaagtagcaattatagaaaacagccacctttcctagggatgaaggagaacaaacaaggaaggaatttagcaactttcattggagccctttccacagtcggattcagacctctggggaaaggtgtggctgcacaagaacacatagtccattagtagaaaattagcttgttggagggcaccagctgtcattggaccacaggagcagcctgctgctgagtggaggaaaaacttactgaacagtatggactgcagctaaaccatgaggaaggctgaggtgagcataactcccaccaacacacacacacatgacaatatgctggcttccacagcatgatggaagaaggaaaagaagtccttcttcctgatctggccttgaagaattactccagcaccctttattattaaagattaacattgtgccagctgggaagaagaaatgttcatagggtccagttctagtatcacaaagcacagtgaagaagggtaaatttcaggctaaaaggcaaaaattaatagtagtataactaatttaaagatgtggtccattagtgcacactgttattcaaaaacaaaatagactataagaaaattattcctgtgcaataagaatagagcctaaggcttttaagtctgaatgagggactataaatttttcaaaatgagaatttgtttctaaaattttccatttaaaatatccattccttgccaaagtttacttaaagcgttctttaaactcattatttaaaattatttaattacaaataataaatatcttgtggcaaaatatactacatatgatatcaaaagaaaatacaaactatttgcaatatgtatgaatgacaaagataattatcattaatttataaagagttccttcagactgattagaaaggcaaataaatcaatataaagtgggcaaagtatttgaagaggcaatcatagaaaatgaaatgcaaaaggtcaacatatatatgaaaatatactcaaacaaaatagttgataaaatacaaaataaatcatcacattacttaaaatgtgaaatttttccctctgattgaaacattttaataacatcccatgataccaaggatgtaagaaaataaacctaatcacacattgttgagcattgtaactttcaacaatttctgaatagccttctggtagtattaattaaaatttataatgcaattatctttggaccaagcaatctacttcttggaagttttttataaaatatatatctatatatgactaaatatatatatatatggatatatatgaatgattcagaaagcaatatactttattagcaaaaaaaaactggaataatctgaatgtctatcagtacaagaaggaatgattaaattatggtaattctcaatacgaaacaaaatacagtaatttaaaactcagttatatttttgaatgttgatttgaaagtgtattcataaaataaggtgaaatgaaaaaaagtttccaaataacacatattttgatcctgtttttataatgcaattacatatggatatagctggtataatcttgtttaggcagataaaaatgtatagtgtagaatgaggaacattgccttttaaacagtggttacattagtgtgcagaagtaaagctttcaagaagacaattttaatagaaatagtcccataatgttcaaattattagaacaggcataaattacttttaaaatttaaatagttaatatataaatatatatgctttctttattgctgtcctgtgaacctgtaatctcctttttcctatggctaagggagaaaaagagccattttagtgggtagatttataattttaaaaattagacttggtgatgtgtgagatcccttctttttcagtattacgtaaggtatgtgggagatgtgttgtcagatggaaggagggagtgtggctgccttatggaggaagacaagtgggctgtgtaaagattttgaggatgaatacagatgagcaaagctgaaggacagttttctaagcagaagtgaagtgggcagtgaattctatattcatgttcttcattcacaagaaatagtatcatcaggaaagaaaaaaatgcaaacaaccttcacccttcaaagtatagcagagggattaaaggatgccatctgcctcatgcactgtcacaggaaattaatttcttaaggtgctagcaagttcagattgctacttcaacctatctagttgaaaatcagaggaaatcttagaaataactagtcaaggtaactgtacacagtacaagataaagcctgactcagttataaatagcaatgacagagttagcttaaagaggagaggatccttctggataaccttacatgcaatacaaacacaaatgtaagacttgaaactatgaaactactatgagaaaacataggggaaatgcttcatggcattaatctggacaaaatttattttacataagactgcaagagcataggcaacaaaagcaaaaacagacaaatgtgattgcatcaaagaagcttctgtacagcaaaggaaataatcaacagaatgaagagacaaactacaaactgggagaaaatatttgcaaactatacctctgataggtattaatatggaagacaacaagccttggctaagatgtagagaaaaaggaacatttacaccctgttggtaggaatgcaaattagtacagtcactataaaaatagtatggaggtttgtcaaaaaattaaaaaaagaactaccatactatcccacaatcccactggtgggtatatgtatccaaaggaaaagacacagtatatcaaagagatatctgcactcccatatttactacagcactattcacaatagccaagatattgaatgaagttaagtgtccatcaatggatgaatgaatgaacaaagaaaaggtggtacatataaaaaatggaatactattcagcaataaaaaagaatgaagtcttgtcatttgttacaacatcaacaatcctggaggacattcacttaagtggagtaagtcagaaacagaaagataaatgccaatgatctcactcacatgtggaatcaaaaaaatctaatttcatagaatagagaatagtggttatcagaggttggggagggtagtgggtagcacttgttgggtggaaggatagagagaggttagtcaatgggtataaagctgcaattagatagatggaataagttctggtgctttattgtgcagtagtacgactataactagaaataatatattgtatacatattccaaatagctagaagagagggttctgaatgttcttgccacaaagaaatattagatgtttgaggtaatagatttgttacatatcctgatttgattattacataaggtatacacacattgaaatatcacattgtacaccataatttcatacaattatatgtcaattaaaaataaaactaaaaattcatgatcagctggttatagcaatgtataagatgcagcattcctttggaaatagcaggtgaagaggggaggcacttaggggtatacatcaattatgtaccttgtagtaccagatacttaattgactaaatctcattgaatactcaggacaacattagaagaagtattatcactcttctattttatagatgagaaggttacagagagaattgtctcatctgttttgcaatgctaataggcaaagccaaaaccgaaacccaattcagctatccaacctctatgatctttgtatcacacaatgtctcccacactgacttattgtcacagatggatattagtaaaccatacatttcaaatgcaatatactgattgcatgctagctatgtgtctagaagagccatatctgtaataaagaatgtgaaagaaatatgtatagtggaggttgccttcaggaagtagtgttgccatttgattcctttctcttcctccttttcaggattgctttacctgtaagttctatactttcttgtgtttttatgatggtaaatattgtccttttctttctttgtttatttatttattttttttttttgagacagagtcttgctctgtcacccaggctgagatgcaatggcacaatcttgcctcactacaaattctacctcctggttcatgtgattctcatgccccagcctcctgagtagctaggattacaggtgtatgccaccatgcctgctaatttttgtttttttggggagagaccaagttttcccctgttcttgaaaccctgacctcaggtgatctgcctgccttggcctcccaaaatgctaggattacaggtgtgagccaccatacccagtgatccttttctttgtgagtttaggattccttccagcatctcttgtagggctggccaagtggtaacaaattcccccagcatttctttgtctgggatttcttctccattaataaagcttaatcttgctgggtatagaattcttggtagacagggttggttttggttttcttttttagcactttaaatatgccatcccattctcttctgtcctgtaaagattctcctgagaaatctactgttagtctgatggggtttccattataggtgactagctgcttttctcttgctaattttataattctttccttcacttttactttaaacagtctgattatgatatgccatggtaaagacttttttgcaattcatctgcctggggatctttgggcttcctgcatttgaatgtccaaatatcttgctagaattggtaatttcttatcaattattttgttaaatggattttctaaactttttaatttttcttccctcttaggaataccaataatttatgtttgttcactttacgtagtcccacacatctcaaaggctttgtttgtgcatctcaccacactgccacagctgctgacacatgcaagttagcatggatcactctgtcatcaacccaataaagcactttggctggcaccacccatcatagtgctgtggccagcagactgggaatatcttggcccctccagtgcagtagattcctaaccttgagaagccacagaacaaagatggggggctggtattagctcccagagttagaacatgcagaccaggagtgctgagctgaggcttggccccgtataatcctctagaatcaaacccagttaactgatcctaacttataccacaatcatacctccaggagcatcaaaggagataaagaccaaaaaaaaaaaaaaatccaaaagacagcaatctcaaagattgaaggaatatcaatccacaccgatgggaaggaaaaaaagtgcaataactggcaactcaagaagccagaatgtcctcttacataaaaacagtcacactaattccccagcaacagttcttaatcagattgcaatagctaagacgacagaaatagaattgagagtatgtataggaataaacattcagtagaaaatcaaacccctattgaagaaatctaagaatactaaaataatgcaagagataaaagacaaaatttccattttaagaaacaaccaaactgatctaattgagctgaaaaactcacatcaagaatttcataatacaatcacaaatattcacagcagaatggacaaagcagaggaaagaactcacttcaagaatttcataatgcaatcacaaatatttacagcagaatggatgaggccaaggaaggaaactcagagcttaaagaccagtattccaaaattagtcagacaaaaattttaaaaaacaataagaatgaacaaaatatttgagaaatacaggatcatgtaaagagaccaaatttacaattcattggcatccctgaaagagatggagagaaagcaatcaacttggaaaacatatttgcagatattgtgcatgaaaatgtccccaatctggctacagaagccagcatttaaattcaagaaatgcagagaacccctgtgagatactgtacaagatgaccatcccctagacatatagtcatcagattctccaaggtcgaagtgaaagaaaaaatgttaaaggcagctagagagacagggcaagtcaccaacaaagggaacctcaataaactaatagcagacctttcagtagaaattctacaagccagagtacacggtgtgtgcttactcaaaattcttaaagaaattccaaacaagaattacatattcaaccaaactaaacttcataagacaaggagaaataagatccttttcagccaagcaaatgctgagagaattcattaccatcaaacttgccttacaaaggaccctaaaggaagtactaaatatggaaacgaaatagtattacaagccaccacaaaaacatacttaagtacacagaccagtgacactataaagcaaccatgcaaacaagtctgtataataaccagctaacattatgatgacaggaccaaatctacacatatcaatactaacctttaatgtaaatgagataaatgcccattaaaaggcacagagtagcaagttggataaagcatcaagacccaagtgtatgctgtcttcaagagatgcatctcacaagcaatgacatccatagtctcaaaataaagggaggtagaaaaatctaccaaggaaatggaaaacagaagataaagtagaggttgctactctaatttcagacaaaatagactataaaccaataatgatcaaaaaagacaaagaagggcattacataatggcaaagggttcaattcaacaaggagacctaactctcctaaatatatatgcatccaacacaggagcacccagattcataaagcaagttcccagagacctgcaaagagacttagattctcaaacaataatagtgggagacttcaacaccccactgacagtattagacagatcgtcaaggtagaaaactaacatagatctctgggacctaaacttgacatttgatcaaatggtcctaactgatatctacagaattctccaccagaatacaacagaatatacatacttctcatctgcacatggcacatactttaaaatcaaccacatcattgcccataaagcaatcctctgcaaattaaaaaaaaatgccaaaatcataccaaacacactcactggccacagtgtaataaaaagataaatcaatattatgaaaatcactcaaaaccatataattgcatggaaattaaacaacctgaacctgaacgactttggtaaagcatgaaattaaggcagaaatcaagaaattctttgaaattaatgagaacaaagatcacataccagaatttctaggaagcagctaaagcagtgtcaataggattatagcactaaatgcctacgtcggaaagttagaaagatcacagattaacaatctaacatcgcacctagaggaactagagaaacaagagcaaaccaactcccaggctagcagaagacaaaaaataaccaaattcagaagtgaacagaaagaaaatgagattcaaaaacccatagaaaagatcaacaaatccaggagttggttctttgaaaactaaattagattaattggctgctagctagaataacaaaaatatagaatatccaaatacacacaatcataaatggcaaaggggatattcccactgaccccacagaaatacaggtaaccctcagtgatttctataaaaaactatgcgcacaaactagaaaacatacaagaaatgggataaattcttagacacatacaacctcccaagattgaaaaaggaagaaattgaatccttgaacagaccagtaatgagacccataattaaattagtaataaaaagctaccaaccagaaaaaagcccaggaccagatgagttcacagcctaattctattctatcagatgtataaagaagaactggtaccatttctactaaaattattccaaaaaattcacagcctaattctaccagatgtataaagaagaactggtaccattcctactgaaattattccaaaaaattaaggaggagggattcctccgtagctcattcaaagaggtcagcatcatcctgataccaaaaactggcagagacacacacacaaaatgaaaattttaggccaatatccccgaagaatatagatgatgaaaaagtcctcaacaaaatactagtaaaccaaattcagcagcatgtcaaaaagcacgtcaaaaacatgaacaagcaggcagtatccctgggaggcaacgttggttcaacatacacaattcaataagtgtgattcatcacataaacataactaaaaaccacatgatcatcacaatagatgcagaaaaggctttcaataaaattccacatcccttcatgttaaaaccctcaacaaactaggcaacaaacatattcccaaataataagagccatctatgcaaacttatagccaacattataatgaatgggtaaaatctggaagcattcctcttaaaaactgaaacaaaacaaagatgctcactctcaccactcctttttaacatggtactggaagtctcagctagaacaatcaggcaagagaaaaaaataaaaatgcatccaactaggaagagaaaaagtcaaactatctctgcagatgatattactctatacctaggaaaccccatagtctctgctcaaaagcatctagatccgataaacaacttcagcaaagtttcaggatacaaaatcaatgcacaaaaaaaaattagtagcatttctatacaccaacaacatccaagctgagagccaatcaagtacacaaccccattcacaatagccacaaaaagaatgaaatacccagaaatacagccagccatggagatgaaagatcctacaatgagaactacaaaatatcactcaaagaaatttgagatgatacaaacaaatggaaaaacatttcatgctcatggatagaaaaaataaatatcattaaaatggccatactgcccaaagcaatttataaattcaatgctgtttatctattaatgtaccattgacattcttcacagaactagatgaaactattttaaatttcatatggagccaaaaaagaggctgaatagccaaggcaatcctaaccaaaaagaacaaagctgaaggcatcaaattacccaacttcaaactatactacaatgctacagtaaccaaaacagcatggtactgctacaaaaacagacacatagaccattggaacaaaatagagagccaagaaataaagccacacacttgcaatcatctgttccttgacaaagttgacaaaagcaagcagtggggaaaggactctgtattccatatatgatgctgggataactggctagccatattcagaagatttacactaggccccttccttactccatacataaaaattaacttcagacttaaatgtaaaaccaaaaactgaaaacactggaagataacctaggaaataccattctggacataggccctggaaaggacttcttgaataagacaccaaaagcaattgcaacaaaaataaaagtttacaaatgggacctaattaaactaaagagcttctgcacagcaaaagaaactatcaacagagtaaacagacaacctacagatgggggaatatatttgcaaactatgcatctagcaaagatctactatgcagaatctatatggaactcaaacaaaataataagcaaaaaacaaccccattaaaaagtaggcaaaggtcatgaatacttttcaaaaaaagatatataagcagtcaccatacaagcctatgaaaaaatactcaacatcagccaggtgcggtggctcactcctgtaatcccagcactttgggaggccgaggcaggcagatcatgaggtcaggaaatcaagactatcctggctaacacagtgaaactctgtctctactaaaaatacaaaaaattagctgggggtggtggcaggcacctgtaggcccagctacttgggaggctgacgtgggagaatggcatgaacccgggaggcagagcttgcaatgagccgagattgtgccactgcactccagcctgggcgacagtgcaagactctgtctaaaaaaattaataaataaaaaatactcaacatcattaataatcagggaaatgcatatgaaaatcacaatgaaatactatctcacaccactcagaatggctattattaaaagacaaaaaataacagatgttggtgaggttgcataggaaagcacttctacactgcttgtgggaatgtaaattagttcagccattgtggaaagcattgtggcaatttctcaaagaacttggaacagaattaccattttatctggcaaacccattattgagtatatagccaaaggaatataaattattctaccatactgacacatgcacatgtatgttcattgcagcactattcacaatagcaaagatatggaatcaacctaaatgcccatcaatggtagactggataaagaaaatgtggcacatttacacaatggaatattatgcaggcataaaaaagaacaagattatgtcctttgtagaagcatggatggaactggaggccattatcctaagtgaactaatgcagaaacagaaaaccaaatactgcatgttctcacttataagtgggagctaaacactgagtacacatgaactcagagaaaggaacaatagacactgaggtctacttgagggtggaaggtaacaggagggagagaatcaaaaaactacctatcagattgtatgcttattacctggatgatgaaataatctgtccaccaaaccctcgtgacacacaatttacctacatgaaaaacctgtacatgtatccctgagcttaaaagtttaaataaatataaataaataaataagtaaaatcagacaaagatggggttcaaaacccatgtctggtacttaatagctgtgtagatcttgagcaattagttcaattattaaaaatttgtttgtgtactctgtagtgttagagggagtgtttctgagactgtgtaggtcacattgagatgctttagagtaacatatgtgaattcagtgtagccaaagtttacagaacctaggccaactcaactccactgcgccccaacttttaaacaactctataattattaggtgtgtctaagattttgagaaataatgaaaagattcactggcatataggagagattcttgaacactagctttctcaaagcagtcttgagataaagaataaatctttgtgtctactaagtggaagaaaatgtgtccttttggcatctagaattctaatacagaatattagatctatattatcttttatgaagatctagaaccctgaagagaaagatggtgtctagagatgcaggccgatgaaatgccataacaatatgggctgatgagagtaagaagcactgttttcaacttttttctgttataaacgactctcagatgttgaaatttgtgcattttcaaagcaggggttcctatagacctaaacttacctcaccatgtcttattgatacaggacctagaaaaaaattatttaggcagatagtgaggacaagagtcctcagcaaggtttcccttttaacaaaaagcagcccctaaatcacttcttttctaacataaagcagcctgaaaaatcgagctgcagacaaagataagcaagctggaagcttgcacaggtgagtgccaatagaaaagggctaccaagaagccaggtatgttcaacatggaggcttcatcttccattttctttgtcaccacgtgtataggaaagaaccaggcaacatggcactggccaggtagagaacccatatgcataataaaagattagggtgaggcagccagcttcttgcacactatgcaaatgacacacctggtctgaccaatcttccgtgccctatgtaaattaaacactgcctcctcaagctagtctataaaaccccgtgtatttcaccacagaactggcaactaatttttctccaggacccctctctgcacagagagctcttctctttcttttgactattaaacttccattcttaacactcttaacctcactctggtgtgtccgcgtcctagttttccctagccatgggacaacgaacctcaggtattaccccagaggaacaatgccacatcactatctcagacttttctgtcctttgagagatggaagtttatcatctcagaaatagagaagcactttaacacgatgaccagagaatctagcttaggatgaatatttcagctcagctaatcaacgggcattattattttatcattgacagcccaaggatattatgtgaaaataatatggctttcccatatccacagttattcaaggaatgtccttctcaaaatactgatgagaagagagggtagggggcaaaatagaggagaccagagagagaaggaaggataagaggaaaggagagaaatctattttactgaaggaaagtcacagacttctgaatagataggactacagggaaaagcaaggagacagacgaaaagatttgcctttctgatttctccctctatatgactacctattggttagttgattgatttataaatctgacaaatgttgttgtgaattttctgtgtacatgagtactgaaatgtgtaacacttctcatgttaattttactgaagtagcattatgtaagcggtatgtgtgccagaatattaattttaataattagttgacactgatccacccctagtatatttaacagcacctggagggtttctttagcttgagataatataaagatgacaaaaaggaattgttaaaaatggctgaactatcagtctgtaatggggatatgttgtaaatatatagtgtggagggcacagtgaattctgctatatcctctactcctccctacactagaacgctggtaattcttaatcaatgtagtgtctaatgggctagctctagtctaatttcccttggtcctagagaggctcttatgggttgcacagtgctttgactcattgtttgcacttctcgtttcaggggatcgtcttaattctggatttatatgttcagtcaaaatatagcctttaaggactgaggctgaatcaagtgatttctaaggtcagttttcttttcttccaatatgatctgaaaaatgttggctagggctttattatgtcattaatctatgtttctataccctgggcactgaaagtgggacatttttccaggataacttccttctgaaggattagagttttctgtgcaattaagtcacagtgctgggagatagaaacagaatggtttgtttaagggttttttttttcctttttctcttttcttatttatttatgtattaacttacttacttattgattgaatttttgggtgttttatgagaaaaatcacttcctgacaagaaaatgaaactaaatgtggactttctgttttatagtatattgacacttcctgtgtagcctcataaaactcccccccaggcaacattctaaggaaggaactgttaaatcacttcataaccagtatcatgtggaatacacataatcttctgctagaccttaaaaacacaagaaatccaaaacaattttgtctgccttcaagaagttaacaatctattcatccattccatgaattcattaaaaaatcctttcaaggaattaccatgtgctaagctaaatctaactggggacacaagccacacaaataaaaactttctctaccagaaatgaaaaatatagtattgcaatactaacattggtattttcattactaaatattactataacatagcacaagtttgtgttaagttaatggtacagattgcataacaaccatgggagttcagaagcaagaaaagttacaagaaactaggtgtgtcagagagaaggattctttctaaaaacagtattttgcctggcatataaagaagagcttaatttgtcatcattatttttgtggcatctgcctttcccaaaccaaatctttaagtaagagtctctcacctgggcaaatcattgcactatacatttctctatctttacctcatcgggaggtaaagaaaaatctccaacaccctttctgccaaagacaggcagccagaaaagggagcacttgacagtctgcttattctattttctctggtattaggctggaatctatgatactattattctaaaaagaaagtaatcaacatgaaaaagagtttaattttttctacccatgcctccactaaaggatcacttggattttatatttctaaatagttatgagaaaagaaaagaaataaatatgttgggttggccgacataaccatcaaaaagccagattcatatattcaggttggggacaaccacttgtcctgatcacaggaattctattcgtagaatttcagaaccagaagagatattttgaatataagagataaacaatccactctgcattgaagcaggaatagggcccagaagctggtccactcagcttccaactcattgcttttcagtaaaaatcatgacatctcaatggaaacatagcattcacttttaaaccgttgatctaggccaacccactaaccaagaatttaccagaaaggttaaatggtccactaccagtggtgagactgctaattggtggtgcctactaggcaatatctcagcccagtgcttcagttattactctcagttcatcatcaaaataaacattacctccaaattaccctcaggactgactacatattttgcaacaaatgttaaaaatgtttaaaaggtgacagaagagcattaaataaatcatgaggctcttgtaggcttggggattctgtgtgactgcagagattgcatatccttgacgccaatctattttgatcctaaagacggagacagaaaatgggtaactagttaaattttcaattccaagtgaaagtcatttacagcttcagtaactttttccatgttttccatctaagaaactcaggtagatcattcaggcagcaagtctctggagaggagtctgctggttttctgtagtaaattttacaacacagtccttgagacttgaatttttaccctccaggaaaaaaataaataaataaaggcaactgcccatcagtgacccatattctgcctcctttgctcctattaaacttttctgttctagatactattcttgattcttttatgtgaattgaagtcctaaagttggaaggtggggtaaaatattatagcagccaggggaggttagcctgattttcaggcgaaacagatgggcaatcaagggatttgagagttcagtctctcttactgcattttttgaagtttttctcaaagtgcagtgagtaaactagaccttggagaattcatttgatgtaggtcaacaaagttctgcccttttgccagctttttggacccatctaccctcaccaggcctcagagttggcaatccagcagaaaaatctccaacaccctttctgccaaagacatgcagccagaaaagggagcacttgacagtctgcttattctattttctctggtattaggctggaatctatgatgctattattctaaaaagaaagtaatcaacatgaaaagagtttaattttttctacccatgcctccactgaaggatcacttggattttatatttctaaatagttatgagaaaagaaaagaaataaatatgttgggttggccgacataaccatcaaaaggccagattcatatactcaggaagcagcattcccaacagttaactcatggtcctctgagggtgtttaaatttttcctgaccccattagcctgaaaaacagaaggtctacgttcccttaaaggcaactaactatgcattctctcaccttaataaaaaggtgtagtggggactacaatccaaatcagtgaataatcaaaaatgtttctattatactttgagatgcactacttttttattaggggcagactttcctaattgtatagaaagaagtaaatatgcataagatagacaaagtacacacactgactaatgagagaagctacatatcccaaagttttccgagaagaaagatgttttcaatttgggatataaaaaggtagctaatccatatatttttaaaagactctataaaaatgctctttatgtgctcagaattaaattactgcatctaaatatactaataattaaaatcaagagatctcttcctggacatttgtgcatgccctcatatccatatttttgttagagaatagatagctttcactatattttcaaaaaaagaacccaggcctatcacagggttgatctttttaaaatccaaagcacttcacacccattgcttcaatctgagcaacacttttaaatattctttagctaagaggccttgaaatagacttccttgattttctatctaatgataagatatttatttgtgaagacataggaaatgtcaaaaatgtacaactatcctgaaaactaacacaataaagctgataatctactcacaccttgactcatcaaatgaaaccctcctggacaaaaagcaagaaaacacattgtcctctacacccgactgcccccccaatctcagagacctagagttggtacccgccagaaactgaacatctgcctctcctaatcagctaccaatatttgaaaaagatatcttttcatatccaaattgggactgacatgctttcatggaaatggaggaaaaaagacaatgaggatttgaggggtctaaaggcagtggcctgccagattaaatcacattcccacagtaaaacaacaaaggcaaaaagtgatcgggagaactctcatgattttatagtttgaaactcaagtacaaagccttttgtttttatctagattcattattattgttgttgatatattttttatgttcttcatactttattgtgaacagctgctggggaataagatgagatcccaactcagtatagcaagaccaaaccagataaatccctgatagaaacttgaagtggaactggaaggtgtgcacatcaaactgtcctggacctgtaaacccgagaagagaatttaaaagaactgtgagcaggaataaagaaaatccacacatcctgacagagagagtatcaggacagaaactaccccattcacaaatgtgtttctgattctttcaaaatattaccataaggagttaaaagggtccaattaacaatggacctggatggaagagaaaatatttgcaatgactgcaacttctacagccacttacctgaaaagatctactactgttttactgtatgataccacaaatatgtttctctctcaaaattatcaaagtgggaagccacttgtctccttgatttttcctaatttatattaatttaaggataaatttatccacatttggtactgttctcaccccatggtgcatttcaatttctaatttcattgaagtttaaaaaacatttaatgactaagatacaaatacttatagaatttatattcatctctttgatctttacaggtgatttaacaaaagccaattctaattctttgggagtcacatatatcagcccttcttttgcttgtcctgattctgtcttattcagaatatttccattgaatccactgaagaatccctttcagagagtcaaacttgctaatcccagtagttataagatatgaaatatgacgccatgtttccatgttcagtctctgtgtctctgccgtcatcattcccaccatcacaacctcagccctatcctccctatcagctccttcataacctctcatctccaccaccccctgtcctacctccataattgatcagtatgctctagctttctccttttcccaggactactggagcttgtaaataagacactatctcagaaattaggatctgcaggcccttctctcccaagtttcctcctccattctgaatttcttttgctaccattaactttattaacataggccccctcaccctgaaactttagaagctcattgtagaacagatgttcttcctgaaccctacctatgtggtacccctttctctagattaatctctgctatcaattcagataaggaacctctgcctggacatctgacttccatccctttcatgcctctcctcaaagatctgtcagaggactttccaattcccttcccagaaccaagctccataaccaagtatatttctcagcctttatacttgagtgatccatatttcttttcatgcttaccagactttttgtctaaaccttatatactacatcaaagtccttcagagttacagttataagctgtgttcctttgtttctggtttgtgtttcttagatatcattgcctccttgactcttactagtttgaaatacaaatctaatttctagcagcaggtatcctagatttaatcacataaagtataggaagatttagctttttgtgctcaattcttcaaaaaaaaaaaaatagcacacatagtccagatttgaggagaaacaattcagtgtattgagcttttagatttatttcagtgtgctgggaatataaatatccttacatgacttctataaagaaaaaaaaaaagtactcctggaagtctataaaattcccaaaatttgaggtaagattcatgtgccctgtgttcttgttgaaaaagaaataacctgaattgtgctctaaataaagaagatccattactttcaatggtttgtcttaggcaagctgattgccaagcaggaaacatgctgaactaggtcatatgacaaaaggccagtttgagagcatgaaaataataattttcatctgcttcacggttgctaccacttccctttgctaccaaatcagaaaatcatcaatgtaaaagaatacatgaaataaaaatgctaggaggtggaggcagcttaacaatgttcactttttcctcatagagaccccaaagctttgtgatctaggattgcatacaatttaaagaacccagagtcataagcttagggagaggacaaagcagcactgaaggctgtaccaactatcatataaagaaattccctgttatgccatagtgacttgtttccctgctctgttgacttctgtgtcacaattaggaaaatgcttttggcatccaaagacacatattcagaaatagactgaaagactgcagccagcttctttgactataagcaacaaaaataaacaccgacccacttaaaaaggaaatgattatttgttggaaagatcttgggtagctcacgtagtcagtagaacagctggaaaacctggccctaagaaggagttctgggtagcagtgccatactaagccatctgatcaaagtgcccacactagaatgaagaagctctaaatatttttccatgtttttatagcaccaccaatatcataggagagattctaaattagccaaacttagatcatgtgcccactccttggacaggagaataaagactaacttaatttacagtgccaacaagatggcacagaatcagagaaaagttgttactcaaaagttaattggaatgctattacaaaaaagcaggcggtggctgggaaataaatgctgagttgttgaacatgcaacaaatttccactacatggcttgatatatttatgtaagatatgtatctttcttccttgttattctttctgctcaaatgctctttgtaaggtcactcagcctattaggagatgccaccctgcctataaagacagttcacagaattcttgcaactgagttgcaattcagatcttgagaaggtgtgctaaagtagcccatgtaacttgctctgtcctcatgaaccatgaccctgacttaaactcactaggttactgctgcccttggtaataaattcagtgcctgtcaatttttacaaatgttttaggtgaaagagtttgaagaaccatcctctcttttctgcctcactagagattcctccaggaaaaaatatagttctttaacctctactacaaatacctcctgctagctagacctacatctctctaggcagtgtcttggaactcaagacagcatttttaattgtcttgagagtataaagaaagaaaaagagagagaaaggatgaacacgaaacagtgaagaatggcatgcacatattttgtccgtttggagagcagttatttcacctgcactaagacaatcaacacaaagtaaaaacaccagttgtttttgtcctacacagtaggccataagaccaatgtgactgattcctttaaatgaaattaacaaattacttaaggttctaatgatcaagctgagaatttgcaatgggatacaacagaaaaataatagcatttggtaaaaaaaaaaaaaaatcagacctgaatttacatctctgcttctctattaactagacaaaataatgaaccctcctaaaccttatccagtatctctaaattgatttcattttgttgtattcaatgagagaatatatataaagtggcttgtacttactcaataatgatcattcattctactgtctttggtacaattaaaagaagaacatccggagcacacaagaaagtctactcatatgcacttcttcatcattaaatgagcatttattgcatgtcaacacaatgccagatactgttctggagactgggtttgttatggcaaacaagacaaagccttctccctcatgaagtctaaatactggggtaaaagatagtgatacataaacaaataaaacagaatataattagagaaaaatattgatgagtgagtgctctgaagaataaaatgtaggatgagaagtgattatttaaataagaaagttaaataatatggcttccctgaagaggtaacatttgaataacaatatgaaaaatgaagaaaaaacgctgaccttggacagatatggagaaaagttatccatgtggagagaacagcaagggtaacaactctgaggtagcagtgagcctaacatgtttgaagaacaacaagaaggtctgtgtgagcaaggtttgaagaaagtgagacagcctgttagaagaggagatcagggccaggcgctgtggctcacgcctgtaatctcagcactttgggaggccgaggcaggcagatcatgaggtcaggagattgaaaccatcttggctaacacagtgaaaccccatctctactaaaaatacaaaaaattagctgggtgtggtggcaagcgcctgtagtctcagctatttgggaggctgaggcaggaaaatggcctaaatccaggaggcagaggttgcagtgagccaagatcatgccactgcactccagcctgggagacagagcgagactccatctaaaaaaaaaaaaaaaaaaaaagaggagatcagaagctggctctggtcagatcatataaggccttataggttttggtgtggaatttagatttcattctagtgtaatggaaactcatagaagtgtcttcaggaaattagtgatatgatttgatttctaatttaaaagaatcactctgactgctatatggggaagaaattcttgaaaacaattatcattccccacactaaacacattttaattctagtcacacacttctggctacagccaaggttacccatgcatttttaaaaagtatatttaacataacatttcaagtgttgtctatccggttccaagtacaaagaaactatttacctcagttgctctgtatacacaagttctatcaacaaaatctaaggtcatatttacttaaaaaaaaaaaactgcatggcaagatgaagtagcagtggctggactgattcctgcctgcagtaattttaaaattgggcaaaatacatgaaataggtttttcagacattttatgttgagtaacacaggatcatgatccttgagaaaactgaagcaaatgtgagtcccacacttgttctagcttattatctgcaaagtttccacaccactgattcaaggagataaatctaagaatccacagtggcaagagttcccagagcaaactaccatggaggagagggaaactgcacaaagaagtggctctagaggtttgtagagagttccccttgaagcttcagctgagaacttaccagcacatgcatatagggaaagtatgcaagttcaaggaaagaaccattcaaaaggactagagggaacagtctccagagttcacttggcaccaggaatagtttgtgtcctcaccaggcagaatgaaagaactttgtaacacattggcaacattgagtattcagaagggcatagtaatggagaaagattaggcatagactaaagactgctctgctccatattaaaaagtttcaaagcaagcttagaaaggataaaatagtttccatataacttagttgcattccagaataagtagaaagtagaaatcaaaatatgaattacaaagtattttgaactaagtaaaaataaaatatcaaaattagcaggatgcagcaaacacagcatctagagggaaattcatggcacttaaaacttacattagaaaagaagaaggtctccaatcagagaacagctcagttgtggagaccctagcccagcagtgctagaggaattaaagacacacacacagaaatatagagtgtggagtgggaaatgaggggtctgacagccttcagagttgagagcctcagttagagatttacccacatatttattgacagaaatctagtgataaacattatttctgtagattatagattaactaaaatattccttacaggaaacaaagggatgggccgaaataaagggatgggctttggctagttatctgcagcaggaacatgtccttaaggcacagatcactcatgctattgtttgtagttcaggaaagcctttaaacggttttctgccctggatgggcaaggtgttccttgcccacattccagtaaactgacaaccttccagcacgggcgtcatggccatgaagaacatgtcacagttctgcagagattttgtttatggcgagtttgagggccagtttatggccagatttgggggcctgttcccaacatgactttaaacaacaacaacaaaaaagaccaaattgtaaccaaaatgagtggaagaaaggaataacatcagagtacacatcaatgaaatagaaaacataaaagcaatagtgaaaatcaataaaaacaccaagagttggtcctttgaatagacaaatgaaagtgataaatctctagccagatccatcagtataaaaaggaaagacataacctaaaagagagaggagacataactacagatcccacaaataataaaatataatataagggaatattataaatactatacctacaaatttgagatatccaataaaatggaaagattccttgaaatacataactataattcactctagaataattagataatctgtacagctctaatacccattaaagatattggatttgtattttaaaaatatttccacaaaacaaattagggctcaggtgttttcgctggtgaattctacaaaagatttaaaaagaaaataatacaatttttttttagatacagggccttgctctgttgcccagcctggagtacagtggcatgattatagctcattgcagccttgaactcaggttcaagggatcttcccacctcaacctcccaagtagcaaggactaaaggcatgcaccaccgtgcctggctaattttttaattttttgtagagatggagttatgtcgtgttgcccaggctggactcaaactcctatgcttaagcaatcttactgcttcagcctcccaaagtacattttttttaatttttattttttaatttgtgtaggtgtataataggtgaatgtatttatggagtacatgaaatattttgatataggcatgcaatgcataataatcacatcaggataagtgagttgcccatcacctcaaacatttctcctttatttaagttacaaacaatctaattgaactctcttagttatttttaaatgcacaataaattattattgactgtagtcaccctgttgtgctatcaattattagatcatattcattctatctatctatatttttgaagccattagccatctccatttccaccccctacctgctctagttcccagcctctgataactatcattcattctctatctccattagtttgttttaatttttagctcccacaaataagcaagaacatgcaaagtttgtctttctgtgcctggctgatttcacttaacataatgacctccagttttatccatgttgctgcaaatgacagggtttctttcttttttatggttgactagtactccattgtgtatatgtaccatattttttaatccattcttctgtcgatggacacttaggttgcatccaaatcttggctattgtgaatagtgctgcaataaacataggagtgcagatatctcttggatattctagtttcattttttttaaatatatacctagcagtgggattgctgggttgtatgataactctatttttcatctttgaggaacctccaaactgctctctgcagtggttatactaaccagcagtgtatgaggatttccttttctccacatcctcaccagcattcattaatatctgtcttttagataaaagacattttaactagggtgaggcgatatctcattgtggttttgatttgtatttctctgatgatcagtgatgttgagcaccttttcatatacctgttttctattcgtatatctacttttgagaaatgtctattcaaatcttttgcctacttttaatcagattattagatttttttcttatagaattgtttgagcaccttatatattctggttctaatcccttgtcagatgggtagtttggaaatagtttctcccattctgtgggttgtctcttcattttattgattgtttcctctgctgtgcagaagcttcttatcttgatgtgatcccatttgtccatttttgctttggttggctctgcttatgaggtattactcaagaaatctttgcccagttcaacattccagagagtttcctcaatgttttcttttagtagttttaaagttttaggtcttagatttaagtatttaatccattttgatttgaaatttggatatggtgagaaatagggatctagtttcattcttctgcatagcgatatctgattttctcagcaccatttaataaagagactgtcttttctcccaacgtatgttcttggctcctttgttgaaaatgagttcactgtagatgtacagatttgtttcttttttctctattctgttctattggtatatgtgtctgttttctttctagtgtcatgctgttttggttactatagctttgcagtataatttgaagtcagataatgtgattcatccaggtttgttcttttggtcagaatagctttggctattacaggtcttttgtgtttctatgtaaattttaggatttttttttctatttctgtgaagaatgtcattggtattttgatagaggttgcactgaatctgtagattgttttgggtagtagggacattttaacatttcttttactgtttatttgctgttggcatatagaaatgctactgatttttgcatattgattttgcccttccagatcttgtaggtgtgctgcactcttctttattcttttctcttttgtctcctctgactatgaattatcaaataacctgtcttcaagcttactcattctttcttctgcctgatcagttctgctattaagagactcagatgcattccacagtatgtcaattgcattttccagctctaaaatttctgtttgaaccaaaggctctttactcagcttttggtgaatgctgccagacctggactctcccttcacggcagtggcaccccctgccccagggaaggtccagtaatgccacctaacagccaaggcctcaaatcagaaacccaaaaagcctgtgctctaacccactgtggctggggtgatacctaagctgcaaaacaaagtcacctttaatcttccctctccttttatcatgcagaaggagtctctccccacagccatgacagctgagaatatactgggtcatacctgaagccagcacaactctatgtctccacccaaggaccacagcaagtactgcttggctaccactgctgattattcagggccctacggctcttgagtcaggaagtgataaatcctgccaggagtggctccttcccttcaaggcagcaggttcctttctggcccagggtgtatctagaaatgtcatctaggagctagggtctggaatggaagactcatgattctgcctgttatataatcctgctgcggctgagtcggtatctgagttgcaaaacaaagtctgctttaatctcccctctcctctcctcacatggatgaaaggagtctctcccagagctgtgagctgtgcaatctggggtgggggaaggtgtgacacaagcagttccatggccactccaagctggtgtctcactacgttgcatgcccctcaactccactggcttcaagcccagcacagcaccaggactagcccaggaattgtaatccttgtggcctagaccgcctttcagttttgcttaggacaccagagcaccttagcctgctatagtggggctcactggaactcagtttctgattgctgggataggcaatcttccagtggctagggctggtctaaatgctccctccatgggcactggctgagttctcccttgtactgctttctactgtgacagggtagcactgagttccaatgcaaagtcccacaatcactgcactctcccatttccaagtgcatagattctctttctatgccacacagttgctgctggggaagtggggaagcgtggccttttgattccccttgaatcaggaattcaagacaatctttcttaccttcttcagttcctttttcagtggtatgaagttaaaaccaggtactctgatcactcacttgacttttggttcctatgaaggttcgtttttgcatggatagttgtgcggtttggcattcctgcaaggagggcattcagtgaaggcttctctttgcccaccttgcttcaccttctcttcgcccatcttgcttcaccttctcttcaaaggacaatttctttttgagtttggaaaatatatcttaaagaacacaaaaagcacaaaagaaaaaaattttttaaattgacttcactcaaattaaaaacttcttctcttcaaaaggcattgctataaaaataaaaatataacccaccacctgagaaaaaatatttgcaaaacatttatccaatgctatggtttgaattctttccctccaaaattcatgttcaaaccattctttttagggattggatcttgctatgctgcccaggcaggagtgcagtggctattgatacatgcagcgtcatcacacactacagccttgaactacctcagccttctaagtagctaagactacaggcacatgccacagcacccagctcaaatttgaaacttaatcccctttttgctcttctgccatgtgaggacatagcattcacccctttttgcccttaaccttccatcatgtgagaatacctacacagagccatctatgagaaacaggccaccagacaccaaacctgccaatgccttgatcttatacttcccagcctccagtactgtgaagacatacatttctgttcttaataaattacccagtctcacattttgtttttacagtgcaaatggactaagacattaaataatgaacttgtatccagactatataatgaactcttgccactcaaaaaggataagacaacaccaaaaaaaaatgagtaaagatttgaacactgtacaaaaaaaaagacctagaaatgataaataagaatttgacaagatgctcaacgtcattagtcaccagggaagtgcaatgtcaaaccataatgagatagcacgactagaactgctacaattaaaacgcacaccaacttttggtgagaatatagagcaccaaggaatatcatacaccattggtgggaatgtaaaatgtttattaaaaatttggcaatttttaaaaatcttaaacacatctctaatatataacagccctatcactccaatgaaaatgaaagcataagtccatgtaaacatttgtacacgaatgttcgtagtagtttgatttgtaataggcaaaaactagaaaaactcaaatgtctattaactgttgaatgaataaataaagcattctactcagcaataaaagtgaatgaactattgatacatacatcaacatggatgaacctcagaataattatactgagagaagctaggccaaaatagaagagtatacactgtatgattctacttacataaaattccaatctctagaaacaaaaagctgacaacttatgctgtctggcctagtatacttttgtaaatgctacgtgaattatttaaaagaatataaatcccctaattgttgaatataattacatttttccattatattaaatttttaaattttgctaatctttagattttttgtttctcttaatgcatcaattactgagagacatttgttaaaatcttgtgctatgttcattatttattacttttcccctgaaattctgttgattttggctttacatattttgaggttattaattgcaaacaagtttataactgctacatcctcctagagaattttcctcttttcattattatttctaataatgtttcctgacctaaagtttattttttaatattaatatagctaccccagccttatatctgttggtaatttccagctacagcttttcccattcttttaccgtcaacctctttgaatcctgaagtttaagtggttcccttataaacaacttacatctacattttgtaataataatatctgttacagttagtaaattcagttcatacattcattgtaattatttgtacattttgacatgtctgtcatgttattttgtactttctatttacagtattctgattttttaattatttttctatttttttccttgtctccccctttctaacttctattttgttgatcaagttccctttattcttttattttctccactggttaaaaatacaaacattctgggccgggcatagtggctcactcctgtaatcccagcactttgggatgccaaggtgggcagattgcttgatcccaggagctcaagaccagcctgggcaacatagcaaaaccttgtctctacagaaaatacaaaaattagccaggaatggtggtgtgcacccccgtagtccaagctacttgtggggctgagcctgggatgtcaaggctgcagtgagctgtgttcacaccactgcactccagcctgggtaacaaagcaataccctgtcttaaaaaataaaaaaaataaaaaaaattcatccagaagtaacttaaaattttacttatttgcttactaaaagtcaaaagttaatcacatttatatacactttctgaacaatacaaaaactaggaaatatttgaaatttaatcatacacctccccacttaaacggggttcttttttgtggtattttacttccgtttgttcatatcacctcctacctccattacagatgatctatttattttcagtacagattcttatttttactattaaaaatttcaaaggtacccattgggaattgaactactatgttttttcttctttctagagattgtatacatgtttcctgataagtagtttaccacatattgcagtaaaccaaagcagacaaatgaccagtaaagctgtttattacctcctactcatgctcagctggaccagtggaacaccatcccagtaggagagacttagggcaggagaaaactgcagagtccctacctaacccagagacctagcaaactggtttatacagaaaggattttcagcaaacatgcaaatacaccaacatgttataagagcaagatatcttttagtctatttctagcaaacagcatacattcataggtacccagtaaaataagaatgaatgccaacgtagaaagtatgtttgccttcacagcactgactaaaaagcacacagcatataatacttcgatctttaagtgggtaatcatggaagttccaagatcatacctactaggttagcctaagtattcatctataaaattttttaaaaaactaaaacttaaaagacacttctagagacaatgggattagcagaagacagtgacacaaggactacaaatgttaaaacgaggagttgttttttgcatgtagcttttatgtaaaggacatctctttccattgattcctatggccaatacaagctgtggtcataggagattctgaaatctcaagatgggcagctggcttgaataacaccctagataaatatcagaaactacactgaagttgaaggactgaaactctgactcatgtaaataagaggtgtgagtgcacaaaaaagattcatgtaaagcctgctgggacagaaggtgttgatggtggattattccacactgttacacaccaacatgtatactggaggaaggggtctcccaggtggaatgattgacacggcctgctccagaggagtcaaactcaaaaacacctaagagaggtgtctacttgaggaggggaggagtaccagggttactaagtggggaggattactaaggttaattaatacaaaaaaaaaaaaaaaatacaataaggcgtttcaggagaaataggtccaggagggttaggtcattttggttttgacctactgatacttagtacgaatgaagaattccagaacacagtcagtctttccaagacatattcttctgtcatcatcatgagcagactctgttggcttattgggttggtgacatccagaatgatcccatttattggctggaggtaggatctagtgctgcagatttttctggaaagttggtatagatgatttgcacaacaaagtcaccactggaccactgcttaagtccagtccccagccttctttttctgctctatagtccaaaaacgtttatctaaaagccaaaacattggtaaaggtgagcagcatgtcgcatatgtcaccagccacttcatctttatgataccgtaacatagttgtgaaaactgctatgttgaatccaggaatctgctacagaggttattcttcaatatattttttctgccaaaaaaatatatttattaaaaataggcatgtagtttagtttattctcttctgtgtcctcaaaactccaggtagtacttgtctatgaaatttctctgtaaaaagtagaacttttcatccatgacaatgtcctctaattatgcaaccacagcatcaaattctgcatcagaggcggagaaggacagattgaagctctcttcttctaaagtacccatggccgcctctgctgccatcaccgccccctagtgggcaagcgggcgaattgggctcctgccctgtccaactcttacagagggcacggcggtcggccagctgggagcaagcctcgtggcccaggctgcccccccgctcactgcctggccaggtgagcacctgcatgtctagcttggcctcacgctccagctgtggtcacgcagcgcaccagctgggcctcttcatctcaccaggctgctccgcacgcaccaccagagatgatgatgatgatgatgatgatgatgatgattattattattattattattattattattattattattttgagacgaagtctccctctgtcgcccaggctggagtgcagtggcgcaatctcggctccccacaacctcctccgagattcaagcgattctcctgccccatctgccagagtagctgggattaacaggcttgcaccaccacacccagctaatttttgtattttttagtagagacggggtttcaccgtgttgaccaagctggtcttgaactcctgaccccaggtgatccactcgcctcggcctcccaaagtactgggattacaggtgggagccacggtgcccggcccgccagagattatttaaaggtatttacatctttgcaaatttctttgatgagtacttaccttcaaatatcactctttgtgagttcaagtttatttttcctgaagcacatcttttagaagttttttcagtgaatgctaaaaatcccttagcttttgttttctgagaataacagcatgtggtgcttcacaacacattactctgacgacaactctaggagcaggattatctttaggttacagataaggacatgttgctcagaaaggttatcttacatctccatcaagtaatggaggaaagcaagactctaagtagatcagtttgactccaatgctccaaacctaatttcccaatgcactgggaaggaaagtcaggtagggatgggatgggaggtggtgaattcaacagtcacgtagaactgatctctcaggcatgagagtgctaaacagcagctgtagtccctggagacttagctacttcctgggcattggtttaatattatttcttaaaggagaaagaaagagaaagaaactggctatccattttaaactcatacttgcttagagtcagctggctctcaggctagtcaacaaaccttgttataatacatagttctagcttccatctgcctcctcagagcaaatgacattatcatagggttttgttttgtttttatcattaaacaaccatcaaacataagtattcaacttgtgtgggtttttttgtccctcctttggtcaccaggaacttttggcttgctctgcttagagagctctttctgattttctcaagacattggtgttctgtgcctcttgtgtgtcctggtgaactccatttactatactgtaatttgagaagaattgagacaagagttatgaaaagtgaaaggagatcataggttggagttacatgtcgaagctccctcttactctgttgggttttacacgcatcctcaacaacagtcgatataggccatttgtagtgtcaagtgccaagattttgctcacataagtttatctgtccaaaatctttgctgcttcctgcctgcctgggaaaatgccatccatgctctcagagtggcccaattctcacctccaggatagctttccttctcccactcatgctgctccctcccaatatgcacaaattcagttcacagtgctatctactgttcctgtcatctttatcttttcttcttcagtagcttatgagctcctcaaaagaagggagtatttctttttaaactcttacggtaattgaccaaactaacagcatggtggaggtgccaataaatttctgctgattcagtgactctgtgtctagtaatgatattgcttgttctaccaccccatgagaatatgtgaacatgtagaatagagaagataggattttagaatcacatagagctaggttcaagtttcagatcattgctcagtagctatacaaccttgggtcattttcacacatgagtgaatcttagagtttttatctataaaatgaaccttcaaggatcattgaggattaaatgaattatgtgtctaaaagtgcctaacgttgaactggtatatagtaaaggctctaaacatgtcaatatttctcatgtctccaaggaaaaagatttcttagtaaatagcctctaatcatcaaaggttcctaaggagcaacatcatagaaggcactctatgcaaatgtatgctcttaatctcagccccatattataggataatgtttcctaaaatataaaccaaggacagactacatggtttgttaaaagacatggattgggtgatcctgataaaaaaaaataacccaagaggcccagcgtggtggctcatacctgtaatcccagcactttgggaggccaaggtaggcggatcacttgaggtcaggaatttgaggccggccgggccaatatggtgaaacctcatctctgcttaaaaaaaatacaaaaattagctgcaaaaattagctgggtgtggtggcaggagcctgtgatcccagatactcgggaggctgaggcaggagaatcacctgaagccaggaggtgaaggttgcagtgagctgagatcatgccactacactccagcctgggtgacaagagcaagactgagtctcaaaaataaataaataaaagaaaagaaatctgagaatcatggcaacagaatgaacttgtatcacatcaatgtcattacagtcatgattccagtgctcctcatgggcaagaccgcttctcatagaattctctcttaacagtgatttcttcctgtttatactgcatgttacagaaactggcggtatttatcttgcagctacatggatttatattttgtcaaactattaaccattttgggaaataaatcacaaaaagttggaaataatctaaatgtggatccataatggataagtgattttctggtaaagtcatgtgataaaatgaattactagtaatttaatagttaatatgaatcactagacccacatgtgtccacgtggatcggtctcaaaaacactgttgaatgaaacaaggagtttcggaacatttacggttgtccctcagtacatgcagaggactgcttccagggagcctgagtataccaaagtctgagcacattcaagtcccataggcagcgctgtgaagcctgtatatacgaaaaattggccttccatataggctggtttcacaacctgctaatattgtattttcaatctgtgtttggaaaacatctgcatctaagtggagccacacgtttcaaactcatgttgttcaagggtcaactgtacatacatttttaaaaatacaaaacagtattacatattggtcttaagattttatatatagtgaaaataaaaacacatggactagaaagattcatgcaaagttaacgatagaattggcattgagtaaggggaataggattagtgaggtatagagagatttcaacttaaatgaaaaataagtaaaaagaaattcgctaatttcacaattattaaatttctatagtggatacatagatgttagcaatattattctccatgcatttttatttaatttttttccaaaatattcaaataaattatttgaagtctgtgtctcaaaacattgtgagagtaataaaataaccataaagtaactagtgacagagataataaagcaacataaaacagcaaaagaaaaaaatatgagtcagttgtgatttctgtaattacatgattgaattttgtggttatttgggggaaacaaagctccattcccacatgtaaaagtgttataaaacagcagcttgaggtttcaagggcaccttgcttttgataggtgtgtcttttaaagggtttttcggaataacctttccaagactcattctaactcctaaagcattcaatcaaattacacacaagcagaaccacctgaacttcacaattaccctgtcctataaccttcaggatacaataaccctcattgttaatgtctagcacttcataaaccagagatagcaagttggaagagatctaacaatgacccctatcaagtgccatttattggattgaacatattaaatacatattaatacatcattgtacttcactgtaatgctatgagatcctgacctacccattttacagatgaggaaatagatgcttatgagattaagactcatagccgaaatggagtggatgcaatttctaacatgtgtctgagttcccttagccacagttcagcctcactcctcccctttcacttgctaacagggaaaaggtacaggattaggcaagagcaaaataaattattttggaggcaagaaggcagttacttgtgtcttaagtggtgggagtgagttaccagaaaagagaaatcaaattgcctttgcatggctaataatgtaatgtctatagttcttaaatcacttattcaacatgtgtgaagcaactgactggaatctaagctgagggtgctgacttgattgattttaccttgttagcccgaagttcctcagccctacaggggctcaccctatactttacccctagctgagcctcaggcaagagctcaatggtgttcctaacagtccccgcaatgcacctgcagtttcagctcaatttttttttttttttttttttgagatggagtctcgctctgtcgcccaggctggagtgcagtggtgaaatctcagctcactgaaagctccacctcccgggttcacgccattctcctgcctcagcctcctgagtagctgggactatagggcacccggctaattttttcgtatttttagtagagacagagtttcaccgtgttagccaggatggtctcgatctcctgacctcgtgatgtgcccgtctcagcctcccaaagtgctgggattataggtgtgagccaccgtgcccggcctcagctcagtttttttgaccgtcaggtaactagtgagaggcagagaagtgtctcgaacaattttcaacactccaaaaacccatagtcctgcatacctcactgactttcccatttacacacttgcaaacacaaaggaatcttaattaacatctgcccatagagagaaacctgaaaaataatcttcagggactaatcataaacctcttttatctcatgttgagttctctatgagatacttagaattcatggaacttctgaaacatttaatagcaaagaaacagcttgacttgcttttcccagtctctgcatttgcccaagcatgattgtctcagttcacaggaggcaacaaaccctttggtttgcacttaactgatgtgcatttcctaatcaaatctcagagaaataaagacagaggggaaattgagacacagagtttgaggcagtcagctctgaaagctgcattcccactagccctataagatttgttgatagggaagaaggcattaagtggaaccagaggccccaaatgatcgcagtcatgcttcctaaatttggggttccaaacaccaaaagaaagctttgccactgagtttgtcaattaatttctcaagcccaaaggggatttaagagacgattaagccttatggtgctgattcgtttacacttcattcagtaatatgctgtttagaaagtaaggttttgtgggggaaaaaaaaggcagaaaaactttgaagtgtctttttaatactagtaaagatttatttgtttcataatagtaaagtggagattattttcccaaaagtaattcaaagctcatctcccttaacaccttaaagctaagttaaagtcagaaacatctgggtttgagctgacgctgtgctcagcacacctttagtaggatcgggaaactcaggtttctagaggactccaaattacaaggctttgaaaagagaatattcagaataaaagcttaagggcagtgctgatgaaattacatttactctcatttactccaggattttttccccaccctgttcttggtgggagcaagtctgatgtatccagttgttaagggatgaagtgtggagcatggagaagaaactttttagtatgttgctgcacattgctcttgtaagaagtaatgagacttaagaacctggagctagcataatctccaccattccaccattttcctttaccccacttctcccagtccccactccatttcacccctccacattccaaattattctcaagtttctgaaggctggggtggaactgttaacagagtgttatgtctgcagaaaaaaaaaatgtcctaacagaagaaaccctgtatttttcctcacgtcataaagcctatattttcctttcatagatttctaacctatgaagttttatgtagagtgcactagaatgggcagcatttagaaagattacggctgcttcctggaagttgacttagaggagggcagaggtggtatgtcacacgtcctttctctaaacttatttaaccctctttttatagacaaaagtttttctaaggtagtctcagaaatgcagttacatacaatagagtgagatcaaaatatgtatcagatggaatgctgggttgatagcaatagtcgtgaccatatatagtataagattctccctgaatcctctcattaaaacagatggagcaactaaaatagcaaaacaaaagtcacacaggtgacatccataacaaaacgatgtaacaacgttactgccatgagccgcaaaatatatacaggtgaagaaagactgcttagagccaaaaggtccttgtaatatcagcatttatttggaatgaggcaaagggaaatcactggacatcatgcacacctgagaacaggagagccccaagtttgtccacaggtactcactgcagagcacacacagcaggcctaatgggaagagaagcaaactctgggagagagtttgcactcttcctcatagtcatctgtaccaggaatccgcaaagagatctgaaagcactggaagaaatatggaccacatgcactctcaaaactaataaaccaaagccccctttgaggacaaaaccccatactcagggaaactgctggaaaatgaattccaattgaacccggcaggaacaataggtgcacaggaaaaaaaggtaacactgataaagataggggagcaccacagaagaggcagttctcagaatagacaatgtttttatactgagtagaaaggaataaaagaagcaaataaaatacctaggaatatacttttgcctcactaaggaggtgaaagacctctacaaggaaaactacaaaatactgctgaaataaatcatagatgacacaaacaaatggaaatgtattccatgctcaatggatgcatagaatcaatattgtgaaaatgaccatactgccaaaagcaatctacagattcaatgcaattcccttcaaaataccatcatcattcttcatggatctagacaaaataattctaaaattcatatggaatcaaaaaagagccctcatagccaaagcaataataagctaaaaaaaagaaaagaaaagaaaatctagaggcatcacatactcaaattcaaattatattaaaaggctatagttaccaaagcagcacggtactagtatagaaatgaaacagaatagagaatctgtaaataaagccaagtacttacagccaactcatcttcaacaaagcatgcaaaaacataaatttggaaaagaacactcgattcaataaatggtgctgggaaaactggcaagccacatgtggaagaattaaactgcatcctcatcttccaccttatacaaaaatcaacttaagatggatcaaagacttaaatctaaaacctgaaatcataaaaattctagaagataacataagagaaactcttctagacattagcttaggcaaagacttcatgactaagaccccaaaagcaagtgcaacgaaaacaaaaataaaatagaacctagtttaactaaaaagcttctgcacagcaaaagaaataatcggcagagtaagcagaccacccacagagtgggagaaaatatttacaaactgtgtatctgacataggacaaatatctagaatctacaaggaattcaaacaaatcagcaagaaaaaaacaattttatcaaaaagtgagcaaaggacatgaatagacaattctcaaaagaagatatacaaacagtcaagaaacatatttaaaaaatgctaaacatcattaattatcagggaaatgcaaattaaaaacacaatgagataccaccctacttttgcataaatgaccttaattaaaaagtcaaaaaacaatagatattggcatggatgtggtgaaaagagaacccttttacactgtagaaatataaactagtagaaccactactgaaagcagtatggagattcctcaaagaaccaaaaatagaactatcatttgatccaccaatcccactgggtatctacccaaaggaaaacaagtcatcatgtgaaaaaagacacatgcgtgcacatgtttatagcagcacaattggcaattgcaaaaatttggaaacaacctaactgctcatcagccaatgagtggataaagaaaatgtgatacatatacaccatggaatactactcagccataaaaagaaacgaaataatggtttttgcacaacttggatagagctggagggcattattctaagtgaagtaactcaggaatggaaaaccaaatattgcatgttctcacttgtaagtgggagataagctatgaggatgcaaaggcataagaatgataaaatgaactttggggacttgggggagaaggttgggagacagtggatgataaaaaatctacacaccgtgtgcagtatacaaccgtcaagtgatgggtgcaccaaaatctcagaagtgaccactaaagaacttatccatgtaaccaaaagccacttgcaccccaaaaactattgaaataaaaattaatcattttcaaaagtgggcagaagacatgaacacactttccaaaagaaaacacaatagtggctaacaagcatatgaacaaatcagcatcaccaatcagcacaaaaatgcaaattaaaaccacaatgagataccatcttacaccagtctcagtagctattatgaaaacatctaaaaacaatagttattggcaaggatggggagaaaagggaatacttatatgctgttggtaggaatgtaaattaatacaacctttagggaaaacaatatagagatttctcaaaaaactaaaaatagagctaccattcaatccagaaatcccactactgagtatatacccagagggaaagaaatcattatatcagaaagatacctgcacttgtatgcttattgcagcaccattcacaatagcagagatagagaatcaacctacgcgtccatcaacagagaaagggataaagaatatgtggtacatatatacaatggaatactactcagtcataaaaaagaatgacttcatggtttttgtagcaacatggctggaactggaggtcattatcctcagtgaaataactcagaaacagcaagtcaagtattgcatgttcttataagtgagagctaaacaatgcatccacatcaacatacaaaatggaataatagacattgaagagtatgaaaggaggggatgggagagggatgaaggttgagagttgaaaaatgacctattgggtacaatgttcactacctggatgatgggtagactaaaagcccagacttgactattacacaatatatgcatgtaagaaacctgcacttatactcctaaatatatattaattggttattttttaagtataaagcccacagacaaactgttatgaacatgcaataatttgtggaatataattcctttacatctttcctgaggattatttaagctgaggacagatggctgagtatcatctaggctgagagatttacattgagactttccaattacattgagtagagcttttacagttctctggaagatttcaaattgtaaaggtcatagtatgacttcttaatgtagtgctaaaatattattgtcaaaacctcaatctgacaagagtaactaatttaatgttacagaaagacaataatgcaacagtgtttgcctattttataattgactctcaataaaacattgctttcactattcttagttggactattctccatttattcaaatcagcccaatattgtattaaaaggcatacatatgcttattttaaaatatcttgtagacatatattcacatcctttaaaaggaaaattatgagacatttataattaaatacctaattttaacattataagcaacactttcaattataatgtccacttaggttaataaacattttgccttttggaaaagaaaaaggaaacaggctttgcactagctgtttctctatcttggacaccacactctccccactgatacccacatggctcatttccccatctcttttaagtcttttctcctcagtaggaacttctatatcaccctatttataactgaattctacttttttgtgtccacacactgctcactagaacataacatgaattagtctattttgctcactaatttgtctctagtgcctagaaaaagtgtctggcatgtagaaagcactcaacaaatgtatttgaatttgaaaaatagataattggtcaaggagggttctggatgatctcaaaatatctttgtgactaagggtgaaaagtcatattgcaaagtattggtttgtttttacttgagaagtcttagaatcctacatgaaactagagactattctcttatccttgttatatagatgagaaaacttatattcaaagatgttaatattgctcatctaaggtcatgtaatggtgggggacacttactctgagctgaagtctttgggtaccaaattcagtgttcttaccactgtagcagttaattcttagtaatatatttggtcagtggagccctcagatgttattatgagctctaaaaattcaacttcacataagtatgaaaataaagtaatcttcaagaaaaacacaacaaaaacaaaatattaggagacagcctagtatcctcaactggagggggttttgcttcaccatccccacccccacagaggacatttggcaatgtctggatacatttttatttgtcacaattgagaaagtactactgcatctaatgggtaaaggaccatgatgctactaaacattctacaacacataggacatcccccaccccctacaaaaaagtattattaagctcaagatgtcaatggagctaaaattgagaaaccctaataacctaagacttgtttaatctgttgaatatcaagcaagactaatgcatcatgataatcagtgtaagaatagaacaattctcatcacattaccttgaatcatttagttcatcgctttagttttaaacattattatttaaccaatgtactttgcttacatataaaaccctttaattggcatttaattaccactcaattccttttcttgtaattaactcattaagcatcttactatgtaaaaacaacactaagcaaatgagctaattagtgtctaattatcagttactaaagattactacaaatgacttacaaatagctagtttctttactactacggggaattcctattgttaaccttaagtaattgactgcaatttgtacagcatggtgtagacataaactgcatgactgttagagctgagacaaaaaaatcttttatcacttcctgaaaaaagaagtgcattagcaaaaggatttttgggattcatgatcccatgacttcatccgtcatgcagcagagcctgtaatgaggagtggcttttttttttttttaattttattttaagttctgggatacacgtgcaggtgcaggtttgttacataggtaaacatgtgccatggtggtttgttgcacccatcaacccgtcatctaggttttaagccccacatccgttagttatttgtcctaattctctccctccccttgccccctaccccctgacaggccacggtttgtgatgttcccctccctgtgtccatgtgttctcttgttcaacccccagttatgagtgagaacatgcagtgtttgattttctgtgcttgtgttagtttgctgaggatgatggtttccagcctcatccatgtccctgaaaaggacatgaactcattcttttgtatggttacatagtattctatggtgtatatgtgccacattccagtctatcatcagtggcatttgggttggttccaaatctttgctattgtacatagtggtgcaataaacatacgtgtgcatatgtctttatagtagattgatttataatatttggggtacatacccagtaatggaattcctgggtcaaatagtatttctggttctagatccttgaagaaacaccacactgtcttccacaatggttgacctaatttacactccctccaacagtgtaaaagtgttcctatttttccatgacctctccagcatctgttgtttcctgactttttaatgatcgccattctaaccggtgtgagatggtatctcattgtggttttgatttgtatttctctaatgaccagtgatgatgagctttttttcatatgtttgttggtcacataaatgtcttcttttgagaagtatctgtttatatccttcgcccactttttgatggggttgtttttttcttataaatttgtgttccttgtagattctagatatgagacctttgtcagatggatagactgcaaatattttctcccattctgtaggttgcctgttcactctgatgatagtttattttgctgtgcagaaactctttagtttaattagatcccatttgtcaattttggcttttgttgccattggttttggtcttttagtcatgaagtctttgcctatgcctatgtcctgaatgatattgcctaggtattcttctagggtttttatggttttaggttttacatttaagtctttaatccatcttgagttaatttttgtgtaaggtgcaaggaaggagtccagtttctgttttctgcatatggctagccagttttcccagcaccatttattaaatagggaatcctttccccgttgcttgtttttgtcagttttgtcaacgatcagatggttgtagatgtgtgatgctacttctgaggcatctgtactgttccattgatattggtaccatgctgttttggttactgcagccttgtagtatagtttgaagtcaggtagcatgatgaggagtggcattttggagttggacaaaagtagacagcagattcactaagctaaaaagacatgagattcctgttgatctagtgccgaaatgctggcaggaaagctctaactaaaccatagatcaggagtcagggtccaataactacataaggtaggttttgttattgtgccatttttcaggtagagaaactggatacagaatggttctgcctcttgcccaaggttacacagcaagtaaggaggtattcaaactagcagtctagaaacagagttgctctcttgatcactaggcaatgatgccttctttctacttactggcaaactcaatacaaatcctgccattgaataatgaagttaattaggtttgttttatttctgaatctacttgaagttgtagtctcagagagtggtcagttacatacgcaccaaccctggcctcagacaccatgtcattggccatgctttaaataatgtagattctttggaatcaggcaggtctaggtttgggtttccactctgcagattactctttatatgattttggataaaaaacttaatcaccctgaacttcaattttctcatctgtaagatgaagataataatacttatcctaaaagaatcctttgataattaaatgaaatcctataaagtgtttggactaggacttggcacatagtagatgtttctttccctttcttgctatatcaaatatcgatctgaaaaaaatctgttgtaatttttttcattattgtgctaaaattaagaagtgagctataccctataaatcaaagcctacactagagaagctttttctttatagtttcatagtcatgtggggtagtggtatttgtaattgatggagtcgcaaaaacaaacaaacaacaacaacaacaacaaaacacggtaaagcaaaataaggagaacttccatgaatattaatggaagttgatctgctcctacttcatatgggtaccaagaaagatcccaaactcatttgctctttcatttcacccaacacttactgagtacttattgtctactaggggctgaattactcactagaaatacagaacattttaaaacaaaaggaaatgatttcttttgaaaacaagtttttctccaatccacagatgtttacagagcactagagatggaaacacaggagagactgtggagatgctagcatgtacaatgctgtctgtgttataacagggggatgcacatggggtaccaaggagcacagatgcacatcacctccataagatgggggccatcacgggagcttcccagtgaaaatgccctctgaactggattttgaaggatgagtaaatgcctcatgagacctagaagaagtataacaccttggctatgagcatgtgccctggaatcccatatgaaactcttactccgtgtgtaaccacaggtagggaacttagctgctctatgcttcaagttcctcctttataaaaccaggatactgagagtaccttacttcatattgtttctgggagaactgaatgcattaatacatgtaaaatcctcagaattatatctggcttataactaggtgcccattacattttaactatcctttttcatccttcaaatttcagccctaatgagaagttaaatggcatgtacaaaggatcagagacatgagaacatagaaccatttggaaaacttcacatagattgatttgacaggagcagagcactccttaggtgtacagatagagcccagatagtgaaggagggggcctcgagtcctcctcgagttctctgaactttgtcatgattactgtgggagatgtaggatttaaaacatggaaatgatcagatctaatttctattttagcaagctctctctgttaacaatgtagaaagcaagcaggctgaagacaaaagaaactgattgaaaagaaacaaccagtgctactgcagttagttttccaagtgaaaaagctaagaatcttgaccctgggcattggcagtgagaatggatggctttcttgcaggtgggacggtagagttgaagacttcctataagactggccttaattttcttacccaaagattggggttgaataaagctgtttgtgcattttcctccctgggacttgaatgatacagcttttctttctttttcttcttttcccccaacatatacttcttttcttgaatggtctcaaagatgatgctttgtgagtgtttgtcaacatagaaagaatatagaagaatcactggcctcagtaggcaggcagcagtctgcttgtgcacaggagtgctgaatggaacaccagtggtaaaaagacattcatggatttaaatccttaagtgtgctgtattaccaagaccacacctcccattcattacaacatctccatgcactcatttcacaacaaaatgttagagcgaatttatttttaatctcatccatttcactgaattaattcatgcacttctgaaatatgcatctcaaattactaacaatttggattaatgccatttccataaaaggtgctaataatgagttgtatcatccctctattttagagaaagaactaattcatcaaggctgactgagctgctttagaacctcctaaaaagtacagatgaatgtgatttcagaatcattgtattgctaatgtacagggctaaatttgttggcaaaagtcctctggtattcttggtgaatgaatccaggtgcagttattaaggtcaaatattatggtgtcattgtcgagagtttttttccataaaaactaaggggaggattacatgtcttataatatagaggtccctaatgaaccgtgtcccacttgcagctgttaaggcaagattcatctcagtaaaaatgtgtggttatcaaagttttaattgtagacttaagaaaatcagagcctcattagctataaaatcataaaattataggcctaggaaagaagttgtatgacttacttcttattcccttggctctagatgagacagtatgtaaaatggtgcagttccctatggcatgtgaaggccatctgtttgtaacacatctccactgagggccaaggttgcttcagctgatctggcagggaagacagctatgttctctttctctcaccattctatttgggcacctgccaacgatgtacatttggtcaaggagcacagccttctaaacagaagagccatttatcttatcaagggtattcaaggatctgtgctactctgcaagttccacgtaagtttatttgaggccaatgggggaataacataggacagtaaatcttttaagactgcctttctctaaaaacctgtcccagagattgacagcactcacagttcagaatttgagtacaatctgaatctatatacaagaaagattttaaaaaccaaacctaatcattgaacaaacccagctctacacgatgactctctcaggtcatgtaactagctaaaggcagacaaggactataactcaattattgcacattgtccaaataacctgagttccttgagttgtggaatatattcatgtttctagtttctcttttaatattacagtgattttcattttactcttcaatattttgggggatgagatatctggaaaatttaacttctggcttgcagaattattgagatgagatgtctgagacaaaagttgacaagttgctgagtcactgctgaatggttttattgcctcagaaaatgaggccacgggccccaaaggtgaaaatttcttgtttaaagaaataatctcaacaatgcaaagaaaaaccacactgaattccctgtgctttctgggtatgtacaattggtgcttggtatcagaactgaggacaaaaaagcctgaacatgcttggccaggagagcatgagcttggaattttttacactcttcaggagactaaaagagcaacaagggagaagcagcaattagagtttcaaattcctgtgccactttctctatcccaaccttataaaataatcaaatgtacctaccagtcctttcctagctctgcttgatatttaatttagtagggacttgtgctaaggactgcatacttaaaaggatttatgagcagactgtttggaggaaactttacagtttcaggatcgcaactcaaacccactaaagagagtgttatttccttgttgtaaactcaatttctgcaactaggaaaattcctgtgaaaattagagctattttacctaaaagggcccttatgattctgtcaggaccaaccactttgagcactggaaatgtagttgcaggtcgggggtggaatggcaggtgaaaagtagaagttcagcgatttagagtcactgaaaaagtcatttggagatttctgctggtaggaagggggaaaatttgtgaagctaaccaagtagccaacaaatgctttttcatctttctatcttaagtactttaaaatgataaaatagaaaaaagcacagactgagaaatgtctgtcagggttaatagctttcttttgaatatgtattaaaaaaacagtatctgggttacagccagttctgatgaattttcaaatgatagatttttaattgaaaaaatagttttctatatgtgaaagaatcaagaaggaaaaaaaatgtcttgctttcagccctataatgctaaccagaattaggttagaccaggggtcagcaaactatttttttaaaggtccatgtagtaaatattttaggcttttctgcctcaaaccatcacaactacttcactctcctgttatgctatgaaagtaactgcagacaattcataagcaaatgggtggggctgtgctccaataaaacattatttataagagcagtcagtttcctgaaattggcctattggctggctgtagtttaccagccccagtcttgactttcatgccaaagctggctgcttaaaatcctaagggggtcaaatttcaaactgaaccttcatagaaaaagaaagtacatgtgtgaaatggaggtatggggttaccatagatcccatgttgatggatgctatataaaattttggaatattccttgactttctcttgacttgacatttttgacattccacataaaaatcaaagatttatgaattaagtgtatgctcctggtctactctgatttaaggaatcctaatttaattgtcagaaataaaaagtggatatcatagaagagaggggtaggggttggtttgtgatgaatccaacccacttcacctctctaaatgagaaacacaaagcgttttataaatatgaggcatggaaatggtgatgtaagactggcattgagatgagaaaagactaatagactcttagctaacttttctcaatcttatcccatgggatgccatacaaaaacttgaaatgggggaatcaccagcaattcagatagtttaactctcatattttagagttttcatttgaggaattatgcctttaaaattcatataccatttatcactctgttttatgtgagagaaaggaactgcctaatgtccatatgtgttgtcatttgttaaaggctttctttaaatgtgatgataaatcagtctccagctgtgtgtcagcaacactgtcacactgagaaaaggaaccttggctccttctcatattttaggcttctcttaaaatgaacagaatttttgtttgatctttatagaatcaaagagaaaaaagatgttagaaagtctcctttatcacctaaaatataaccttgtgcacacattgggcttcttttcaacactataacggaacttctctggctgctgcaaaagattctcttagcaagaactctacactttatgattttttatgtagtacgactagtaacccagtcataacctctgataattgatttattctaaagaacataaagattttttctatagagttattatttaatttttaatgtatattttcaaaatttcaagtgaacagaatattttcaagcaaaagaatacagtaagttttcctctgtttgttagagaaggtccaatttgggtgggttcttagattatagaaaaagtagcccttctttgccccgtttctgatcttgtgatctttacttatagtttatccctgatctttcatctactgcagattttcttgtatttgcactatgaggagatctccttttggcctgtctggtctctcttttaatgaatcatttaaaagacctgtacttttttactcatgcaaaaggcaatactggttgtatctgtgtcaggaagacacaaaaattaggaaaggtactttttctggcaacaactatgagacatcaggaaaagaggtaggattcagagctataagatcttgattcagactcaactttgtgaacattttagccaaatcataacctttctgagcctcatctgaaaaggggatcgtattatcatctcattcagagttgtgaagatgaaagaagataatacattttgaggattaaaagggataatgcatgtagaaatgctttgtagatgctttatagattgcacagtgctaatctgttattgttggcctgataactttacttctctatactgggaaagtcatctcgtgaatgtaactctactctcccttgagccagattgccttggataggatcaggtatcaggtaagttgtttggctcccatatcactgtctgcaaattgtgtaaacatgtgcttttgtagcccacactgatgttggcctgaaatactaagaacaataccactccacttagccatttagctagtggcagtagagaggtctagggggaaaagaagagaaccaatgagctaaagaataaagggaatattatgatgatgctacaccagagtcaaatgatttcttcagaaggaggagcttttcccaagtgatcccacaatgagaaatggtttaattcatttctacagatcaaagagatcaaacagaaaattggaacagggcacaagggaacaccatgctaaaatggcaacaggcaattctcacaaggtgtagaaaaagatgaggactctgcacttcaatagtaaaatttttttttttttttgagacagagtctcactctgttgcccaggctggagtgtagtggtgtgatcatggctcactgcagcctcaacctcccagaacctcccaggctcaagtgattctcccaccgcagcctcccaagtacctgggactacaggtatgtagcatcacacctggataatattttaaattttcttttatagagacagaatctcactatgttgcccaggctggtcttgaaatcctgggcttaagcaatctttctgactctgcctcccaaagtgcaggattacatgcatgaaccactgtgcctgactaatagtaaaaccttaacaactgtcggtggagagactgaatttttttgtattccaatattcttcaacagtaagaagtgactaatacagcataaacttgtgtgggataggagctgcctgagatcaggacaaaaccgtccatgaagaattgtgaaataaaaggaaccaaataagtccactgcaaaaactctaatgttccttaatgaataggcttagaatcatactataaaaattagataaatacataaaaccatattgcatggaattcaatttattttgtagatagttacgcttctaagatgtattgtcctaatagtttttctgtctctttctgtctctctctatatatattttatatatatataataaatgtgtctgtgtgtatgtaactttcaaaaagtattataagaaattacctgacatgagtgaaaagcaactgatacatagtcaaaatctgttgttcagaatgggtgaagaaaacagcctcatcacccctaacagaattgtgtcatcaccagggatctttttaatctagttttgtcacattgcttactgtgaaatgttctcctgactcttagattcacatatgtgagcagaaactgttaggatttgtaattttcaaatcatttacattcatgggggtagagttggtgtgatacagaatcattccttaaataaactaaactcaaaatcctacaaaaagtgagatgagaagagctctcaggaagaatcactaacggagggagagcaattttccaagggagttttgcctctttgatgagcacatcctacttttaaacctgataccaagcacgttcagcctccacagacactgctcttgctggaacagactgaaatgtcttaagcacagcttgattaatattaaggaattagcaaagtgcaaagaaggcacacaaatgtaaaatcaaaatcattacatttaagaattgtaaacttaggatatcacaatgtgttcaacagacatggtactaattacagaatataaattaattaatcaaaactagattcaaatactggctctgctattattagctatgcaatattggaaaagtgcatttccatgaacatcattccttatttttctaaagaaggtagtggtagtggtatttttttcatgttatatatatagttcagtctcccaggaatagctgaatgatccagaggtttacatttgaccagcaatggctaatcagatgctttcccctaagaaactggaaattttaatggaaagataagactaaaagcctttgtagtagactgacattgataccattactctaaagagaccatagacccttgcttctaaggttctacagattatcttttttccttgcatctccacaggcatgttcaactcttcctttgatcctgtgagatacctaagggttcttccaataattgttgctggatttgtttgggtttcttttttgtttgtgcttgtttttgtattttgttttgtttgtggttctaactagccataacttgctttttatttcatgcaatcagaattttgaatcaaaaagaaataagcattaggaaggagtatgctataagtaaaaatttctgaaatgtggaattaatctaggtaaagtaggagcagtggttccccatgatcttaaactgtgaatgatttggtttggctgtgtcccaacccatatctcataattgtaactccgacagttcccatgtgtcatgggagaaacctagtgggaggtaattgaatcatgggggggagcctttcccatgctcttctcatgatagtgaatgagtctcacgggatctgatggttttaaaaatgggagtttccctgcgctagctttcttctcttatcttccgccatgtgagacatacttttcaccttccaccatgattgtgaggcctacccagccacatagaactgtaagcccattaaacctctttcatttgtaaattgcccagtctcaggtatgtcttcatcagcagcatgaaaatgaactaatgcagtaaggtatatcaactgatgccacagtagttatttaaaggattcttcaatcccatagtccctgtggcttgggtggcatgtgatccaggttggccaactgaatcatcaaatcttcaagactcactagaagtgattaattcagtatacactcatgacccaacttaattcactaagattcaagtctagagctttcatttgaattgttaggaaggaagagtctctttctattgcttaatgagggactagaacatacaactagtgctactagcagcagtcttgggaactcaagcagagaatttgcctaagaaagaatcgatacagaggaaagcatagccaagaaatgggagaatgcaaatttgcttgagaaattagatgtagccaggcctgcatattatcttgttacaaatacctgaggccctgaaaataaatacagctttgtaaaaataatttccttctttgatatcttggatacttctataacattattaaagcttttagttttgtctgtatttaaattgctatggtattttcaagttgcatcagccagcactgtatcagtggctaaaagcttttgtgtttgttgttgttgttttgttttgttttttgtttttcgttttttgttttttttttttgagacagggtctcactctgttgcccaggttggagtacagtggtgcaatcacagctcactgcagcctcaaccttcctagctcctagcttcctagattgtgcctgaaatcccagcactttggaaggccaaggtgggtggatcagttgaacccaaaagtttgacaccagcctgagcaacatggcaaaaccctatttccacaaaaaaaattacaaaattagccaggcctggagtcgtgcccctgtagttccagctattcaggaggctgagatgagagaatcgcctaagcctgggaggtagaggctacagtgaactgtgattgcaccactgcactccagcctgggtgacagagtgaaactttgtctcaaaaaaaaaaaaaaaacaatttttagccactgatacaatgttgactaatgcaacttgacaatctcataacaattttaatatagatagaaccattatatttgaagtgacagtgtgtagatggtttttaattatatatttaaagaatttgtgggttttttttttttttttttgacagtcttgctctgtcgcccaggctggagtgcagtggcgtgatcttggctcactgcaagctccgcctcctgggttcagggtattctcctgcctcagcctcccaagtagctgggactacaggcacctgccaccatgcccagctaattttttgtatttttagtagaaacggggtttcaccgtgttagccacaatggtctctatctcctgacctcgtgatccgcccgccttggcctcccaaagtgctgggattacaggcatgagccaccacgcccggccttttttttttttttttaatttagctcagttgcctaagtgcttggcaaagcttgatgtgcttaagttgcctaacttatatagatgattccataaaagagagttcatctcttctggacttcccaaggtaagaggacacacactagcctgtccttctgctactgcatctactgggagtcactaattagacatgttttttcccatgttgcaggacaaaaaaagcacccaactttgttgaggattgaagaccctgggctgtcaggacacctttaccatcttcttggctgtattaatgagactctgttaccacttcactatcctcttggctggaatgctttatgtggttccctgctatgtctaagaaaaacaagtggttgtcttgaagcttacttatgttttatctacattaagcgattctaattccatgcataaaacccacttatttagaagataaagaatctgttatagttaccacctctgaaactagaaaatttgtttctgattccactaatacacagtctatgtcctagatttttcaggtacaggagccaataaattctttctgtctcaagccaatttgaattgcattttctgtcatttgaagccaaaagagtcttaactaatacagtggcttgcctacgacaataggcttatctagttttatagccttgggcaagcctgagtattatctgttctttctttcatcctcagatcttccttgctgatgagccttatgtctttctacttttttactcatcccaatcctcatatgtgcaatgtaccacaataagttgcctgttgaagtcgtcggtgttcaacagatatttttgaagtcaacctaaaggaacattaatactgactggttttaaatagttttaagtatttctgtaaagatcatttacttaacagtgagagtcatactctgtttatctctatatgccctgaacctaggaaaatcctaagcatattggttgcataaattaataaagttaaaatgaattagaaaaactcactgggtgggggagttgaaatggataactgccaggacagggtccctgtaggctatataaaaatgttgcatgagaaaattcttttttatgagaaagaacaaaaggcaaaatcataataagaatgcctaaaacaagcaaaaggtataccagaggctgtacaaaggtttgatgccctagggaaagtagaattgcttacactgctttggtagtagaaagagaacggttatactctcataagtcatgtggacaccctcaattaattatcataatctggtaaggagaaggcccagtactgccatgtcatggagactaccatgtgaatcatgaccctacatcatagcagccctaggacagccagtggggtcttatccaaggaaggaccatggccccttaggaggatgatcccacctctcttattttcttctcctttcattccagactcatgtattcgattaaagcagggaaggtggggggcagtgggaaaagacatttaagctaacaattttaaagtctatgttagcaaaatccctagtccctacatagtcctaaggagaaattttccctaactgaaataaagtttattttgatagtctcatctttccaagcagtctaacacaaacagcctagttttttctactggcaaaatgaacataatactacctgccctgtattcctatagttattgtaataactgttgccaaaataaactcatatatctgaaagtactttgtaaattggaacacattttatggttacaagttttattattcttccttatgcccatacctggtgtccggacattgaggatttggccctgagtaagtcaagcacaaatactgactagttagaattaaccacttgctgcaaataacagccccctaataacggtggcttggcacaatatgtccttcatctcatactccatcatagtcagcagtttattattcatctcagtttcttggatctcatggcctcacccaaatctagattcagagccctctcattacaccagccaatggggaaacagagggaaggcagagcacaggaggattttctaagcaggtgcacatcatgtttcctcccattctgttacacaaaactcaaatcacattgccatgcctaactacaaatggaactggaaatgacaagcttgctggtacccaagagaaagagcagaatatgaatagttgtgagcactggatcagagacacctggccaaggcgttaatgaatttacacagttcttcatcctacatttcatgaagagatcttccccaaccttgtcccccacaccatctggtttatagacccactataaaacctaataaagtacactgtaatcttcttgagtataggaacttttttttcactttattcccacaatgtttaaatatagtgggcacacaaaatgtgctagttgaatctataaaactagtcaggtacctgactcccaactcatttaaagaattcaagtccaaaatcagtggtggtttcttaagcactcccacagtgcaaagttgctgccaagaaatgaatgcctgaccagaaaagttctcaaactccactttctaacccagagacttctgtcacctaatacagagcttagcacatagtaattgtaaatattaactgtggtgagcaaacgagtaagtgattaagtgaataatttaatgaattaacatgagactaacccaaaagttttataaatccagtgagtttgctatttggatcatttggaaatcagtaatgttagttttcttttattctctcattcttttctagtcttttgactctgtcccacatcagtctaactgaagagctgttgtctggtaggcgaaagactgtagatttagttcttgattgaacgttaactctgggttcttgagcaactcagcagatcccaaggctgcccctctgtcctctgaatcatagcctttatttgttactcccgtaggacttaatcacacaatagctgtaccagcttattgtcttgcattagtgttatctttcagattatcacataagtcttcatctggggaggacttttctcccctaattcattgtgaacaacagcagtgtatggctcacgtgtattttctttgttacttctcattgtctaacaaagtcacctttgctaaacagaaaggagtaattcgataaataaccccgagatttgctgagaaattgttctacattcagcagacactttggctctggccatgtgccagtgcaacgctgagctgtacacccaactcatggtccttgccattagggagcatcatccagtggagtaagaaagatattaaacaagtacccattatgcaatgtcataagtgccataaataagtataaaggattataaagcagaggtgaagaaacttaataaattgcctagacttttaagatctcagctttaccacttaatggctatgttactttgacaagctattttaacctctctgacccagagtttcctcatctataaaattagaataatagcagtatccaatttacagggccataaagaggattacatatgttaacatatgtaagatgtttagaacttttagaactgtgcctgataccagtaaatgtgatctattatattcattgttattagttatttttattatttcttgtgaagtacaatgatgatatgataaataacatgcctagattatggtatattttaaatacatattttaaaaatagtttttgaaagtgagatgaatctggaagtgttttaaaaagcactgtataagtccaacttttattatttacagaattataattctgttgttctttgtaactcaaatgaatccagtatacaccggatatcaaaactcaatttgcactaaccaagtacattacattcatctgtcattggaatggacctgataagtatccgagtttctactttctgagttattgctgcagcatgctaactcacgaaaccttccagttgctgagaaaccttgagtgctttctttgctgtttctgtgtgtgcagagattcaaaagcaagattcagagctgagttgtttgtggaactggcgggctggtaacactgttgagtatatatattcataagattttatgctttagaactgaattttgagaaaagaatttagtgcaggtaagtttgaattaaagatataagggataattagatatagggaagcagtggcaggagaattacctggcatctgctccctgctagccagaggaaccagttttaagtcttataaagagagaaaatagctctagaactcacatgatgaagtctgataaaggatatgtgagattctgggaataaatagtgcttcttcaggacacgttatgaagtgaggctgaattagaatgaggtccatttttatccccccaatcccatttccaaattcatattcccttgccacaaattcaatgcacattgacttcacggccaccatggatggcagctaactccatggagcctggctgtaaaagtgccgagccacagtcaggagccttgacaagaaagaagaggcaaagaacacacaccaacctgctcctgagcacatgcgtgcacatgacaaaatcctgagcactcccagatataactaggggaaactttgaaaggggctactggccggacgcagtggctcatgcctgtaatcccagcactttgggaggccaaggtgggcggatcacctgagatcaggagtccaagaccagcctggccaacatggtgaaaccccttctctactaaaactacaaaaattagccaggcatggtgatgggagcctgtaatctccgctactcgggaggctgaggcaggagaatcgcttgaacccaagaggtagagtttgcagtgagccgagattgcaacaaagcgctccagcctgggcaacaaagtgagactccatctcaaaaaaataaaaaataaagaaaatgaaaggggccatgattctgtaaaatgaaaatgagtgatctacattgacaggtgagaaaacagaagctcagcagaagtaggccattttcacgatttggtaagtggcaggagtaggtttaaagttcactgctctggaatccactcctttttcaaaatatcctactgccaaattacttcatagtgtggcctatactagctatactagctatgccataatagctgcctatagggaaagaaacaacagaattacataaaatggaattgtagaccttcatatcatccaaagctagattactgcaacatccactacttctgctatgttctgcagcatgtatgtaaacacacaggcacacacatacacatatacacagagcaattcttttttgtagcagaggcagtgtgttttaatcagctaatatttggttgaaaaaaaattaaagaaagaataatttccatgttatccacctacttggccaagagaaaggccaaggagtgagagcattcagaccatggtgtggtggtaaggtagtgaaatggtagaagttacatctaacatgtgactctctgaatctgaatccctccatccccaaatggtagaaatgcttaattaaatccatattttttaagcactccaatcttttttaatgccattatttttcatcttttgcatctgggtaaatactcctattttggcacaagaaaggaaaggcaggttccagaaactgttctgctgctaggagaccttggggcccaaaaatgagtttttgacaaattggagaggctacctccttgccctacacctagacagcatgtggcattttgtaaagtggcttcatcccatccacccccgagcccaacccagaccacgttgttcagagcacttccaggaaccatctggtgcccagaacattgctatttcaacgtgctttggaatcttccaggatggttgctgtgaccaaagcatgtttttaaatagaaggccttcagttatttggagttgcatcccccagtgatctgtgctgctttgttgctgagggttatttctctgctgtattcatcattgtgctttcatgctgatgatacacactatggccgaaaagattccttctaaatatgatcccaaacagtcgattataaaaggttgaattgtagtcttgcaagattaagtatttttttttagatttaataggccagtgtttttttaagtatttctgtacactcagctttaatttggaataatatcttcacttgactcaagagattttctttaatttcatgattattaaaggcttcagctctcccatagtgcccaaattaagccagaaagaattgaaattcaccaccatactgaattagtttttcccttctctggtttccacagcactccaagcttacctttaattttctattaactagctgtcataattgtctgtttctattgttctttcccagtagccaataagtgcctcaaaggcaatgtatgtcagtcatctttttatccacaaagtctaaccgagtacttggcagtacctaatgggtatccaatacgtatgtttttggattaaaaatttactggtccctgacaattattttaatcccctcaggcactggtcctagatcttcttactttttctcatgttcacctgctctttactctatgaactaccgaagtcctgccacccagctcttcctgaaagcacaaaaggatacttaattctaagaaaggggacatagaagaatgtttagaaagttaatgaatatgatattgagatttccctacttctttaccctacattttccccatgttttttcaagctcaagcttcccattatctgtactaataaagggaacccatagtataggtaattcaaaatagattatctaaataagcccccatacttttgtgggaatgtatcatatagatgcaagagccctggcttgagagacataaggctgaaatcacactgcttacttataaggccttagataagtcattcaacctttctgaaactcaatttcttcacccgcagtgcttaacttgcctagccataggactggtgtctggatctcataagctgttcggtattctgcaaattataaagcacaatacacattgaagaccatgtgaatatgacatctgggatggattttctgatggcgaagagtgacaaataagttagcatcagattaaaacttggtattctgccaagtaaatattaaaattagtttactgtccccaagtgataatgtggggagtcaaaccagctaaatactaagtgcaggaatagctggatggggttatgaagagccatgacagatccactacacggccaattcctctgcaggtaatcagagttgactaactcatatcaagggcacatgatggcaccttgcaccgccgttacccatatggtggaaaaacgaaggttgcttgtgccaaatgcagatccaattaaaacttggaaaggttgctccattatcacatttgcagccataattaaatttgcgaactgagaagagctgccaagcttgcctctctgttttggaaggtgggacatctgttaacattagtatggacatgggcatgggggaaatcacaagaattctgcttcaaaatgaacattcagaataaactgtagtttattttaaggctctgaatactaagccctctatattgtttaatatgcttcagttttttgaagctaacttctgggcttttttaaatatacagatgactttttcctgacatttctcatttctagagtcaaagcttttgaagattagaatgtatgtgttactgcagtttcaacaaggaaggtggtttaagattagaagcaagaagctttaaggaagacccttgatccttcctatggagccacctgacaacactggaattttatgtgccttgattcaaccacctatcagaggcagcaaagctagagggctctggagcatgcggttaaataacattaatgtatttgcataatttgttacaaacaatataaactttctcatttgcaaattcttttaaactgggtagcaatcttatgtagtaggtagctgtatctctattttgcagaaaaataaatgagattctggaacattaagtgacatgctgatattctcacagccacatgagagagaccaagaccaagaacccaggttttctaaattttattccacatatatgtacttaatttgtaagccacatcaatttatgtcagtagagccattcactcacccataaagagccaaatgtttttgtgcaaacgtttttttcaagattatgattctgaaaagtgaactacaattcatttcctggctaacaagatgaaggcctcaattgaacaatgaaccaaaattccctcaaaatagcattggcacaccctgcattggactatgaaaaaaaaaaagaatgcattcggtactggttttaaaataccaaaatgagaaaggaaaagagctgtctggaaagcactctacactgagagacctgagttctggtccttgtggcataaccctggccaaattcattttagcattatttccacaacaggtaaagagatgtggctgaactgaattctctctaagatccctttcatgattcaataaaggacattgagctggaatcaccaccttacactttactgacagattgtcagatctgagtttgaatgacttcaagcacatgcaggcttacacacacacacacttaccaacactttccctatagtaattcagcccacacactcttagaaatcacagcaagtcttaaatgacaacaaacctagccaagggagcaaacaaattagctctgcaattaatttcatgacagcaaaagagatcttggagcagtgatctatgtaggaggattctaagaagagaaggaagattactaggcatgatcagttggtcttgagtggtcattccgctttatgtgaaaggtggctcaaaagtaagaagatgggaaactgaaaatcaagagcattgtggaattgcttgaaaagtcagaatttttcaaagaggccttagcttggtattagtttatagtctatgaaggttttcacacacatggctttgattctcacttcaagtctgtgaagtaaaggaagggcgttatattccctggttaataggtgaagaaacaggcggaggtgcattaagggttatgtccaaagtaacacactcaggaagccttttatggatttgcacgcaccagcgcacctgttaaaaacccacaatagcctgtaatcccagcactttgggaggccgaggcgggcggatcacgaggtcaggagatcgagaccatcctggctaacacggtgaaacccggtctctactaaaaaaattagccgggcgtggtagcgggcgcctagctactcaggaggctgaggcaggagaatggcgtgaacccgggaggcggagcttgcagtgagccgagatcgcgccactgcactccagcctgggcgacagagcgagactccgtctcaaaaaaaaaaaaaaaaaaacccacaataggccaggcgcagtggctcacgcctgtactcccagcactttgggaggccgagacgggtggatcacgaggtcaggagatcaagaccatcctggctatcgcggtgaaaccccatctccactaaaaatacaaaaaattagccaggcatggtggcgggcgcctgtagtcccaactactcgggaggctgaggcaggagaatggcttgaacccgggaggcggagctggcaatgagccgagaccgcgcgccactgcactccagactgggcgaaagagcgagactcccacaaagaaaacacacaatagcagaaaatatgccatcaaaagttaataattcaaacagcccttccccaaccccaaaaagcaaccagatgaaacaactaaagattcaaaaacatacatgtcagtagagtttgtgttcagactttctgagtctcttgcaagtggccaagacaatgtaatgtggcattttggtcaaagtttagcttattacagggaataattattctttgaaatatatatgacatgaccaaactatagatggttaagtgaatcatttttcttttggacacatttatctttgagtttataattattattatgacatatgtattagtaacatttacagcacattacagtaagttgcaatttacaaagataaatttctccaatgttatgtgagcttaactttctcattgaagtcctgttattgaagtaatctgctttcacattttacctagtgaactcttactagccattaaaactcggctcatctctggaagcatttctgacctccgaatccggtttccatcacaaattacatttgataattttctctttaccccattggactataagctcttcgaggtcaggggtcatacctaattcattcttgtattctggtctcctgccacttagaagtgctcaataaatgagaatgaacagatggatgaaagaaggaactggagaatacaatccaggtaacatactgggaaatgtaatttaacacaatttactgcattattgtttgagccgtttggccaatatcgtagaacgttcaacagagtctatattttaaccatgtttaaattaaacacaaactgccttctcaggagacagagactctcaaaatcatgggctggatggggtctccaagaaccatctggtccatccatgcctgcaggcaagtgagtgtctaaataatcgaggggcttttctgttttatttaaagcttcgctttttttaaatagaaaggaggcaaaaatctccctttgtgaagcttctggtttccatccagaagaatcccattcccttaccctgacccttcagaaaagaacagactccgaaagtccctggaaaactgcctcatgcatgaatttgtccctgttcatattttcttctcctttctttcactagtgtaatctcttcctctctcacactcactttcaactatagaacagaacgtccatttcacactgttaaaaatccctgtctcatttttcagtgctaaaacgatacagtgccctgcagatcttcagacactcatttttttaaaggcattgctgtgaaccaagttcattggctgtgggtttaataaactctcccgggcgctggtatctttcagtctgtcaatttaaaaatcctttcttcagcactatagatcactgcagagagagaagtgcactcacaaaaagggacagcaggaaaataccagaatgcaaagaaatgaatgcctcaaaggctgccactgatgaagataattaatagcccagttgtaaataaaataactttaagaatgcaaaatgagataacactattagaaaggggggttgtttatgttctggcaggggtaataaacacaacacacattaagaaatactgaagatgttcatttaaaaattcttaagtttcctactcagcactccacccctctgcccaaaaggctaagatataaacagctctattggtggttttgttccttatttgcttatttcattttaccctcagataaaacacagatcaggtttaggtccaacttcccttaaggatagcacattttcttctctcttttataaacctgatcctattctctatttacatactttgcaacctgcccacatactgccttgcgttgccttttcaattgtatatgtttaaatgtcttgtttcactcaatgagattataaactacttgagggtaggaataatgtcttatatttatcttgtctgatgcacaacagctggcagagtgaaaagcacaacacaggtgcttcacataaactcttcgatacgaatgaaatgagaaacttgggaaactgagaaagtttgattctgtcattccttctggacttaagagaaatgctatcgcagagctttctcaactcatgcattattgatttttacaggtgccacctttttctaaggagatatggggcactaacagccaaccacagtgtgttactctaatcagcaacaattgcggtcttatcctaatcagaacccattgtgcagttaggatgggccctctaaatgacaatcatctcaccattgttaaatagtgaatgcgccttaatatcatcacagcagaaaactgccccaaagtgttctcttgagtaatctactgaaagattaagcaccagcaggtaattggccttatctttctttgggaaacttatgagggacttgaagttgaataaatcaccatgaacaattgtaagaacaaatcactctgggcaatttgatatctttgtaccttcacacacatggggaagatcattttatagtaatgatttccatatcatactcagcgctgtgattctgttagagtgaattatgttcccctttccccacccaaaacagtgtacctgaattgactcagacctaagttttcctagagataagaaatattgacataggattaatcacttttccatttcgtggaagatattagaacctgagaccaacagtctcagtccttttagctgaaaggaagtattggtcctttcagccaaaaggaaggataagagtgtgatcaaaagatattttggaaaaagaaagtaaggcccataacagacagggtttgactggtgtggtctgatacattgtaaaaaatagtcaggttaacttattggaggactacattttgtacttattcaatctatatgcattaagcacccactatatgcaaacagccttgctgagaaatgcagacatacaaagataaagatgcatcccaagttctaaacaactctgtaatatagtagaaaatatcttattatacagaagaaatgttaagtcaccacactatggtttgaatgtttgccccttccaaaaatcatgttgaaatttaattaccattgtaaccatattaagtgagacatttaagaaatgattaggccatgaggtctcttccgccattggtgggattaatcccagggcaagtttggctgccttctcactctcttggccctaccaccttctgtgatatgagcattcagccttcttcccctccaaaagaggcagcatgtaaggttccatctaggaagaaaggaatggcctcaccagacaccaaggtgctagtgccttgaacatagactttccagcttccagaacaatgagccaataaatttctgttcttcctaaattatctagtctgttacagcagcacaaaatgaactaaaacacaccataaggcaatacgtgaaaaggaacactggtgtgtttgacataagtcagtatttcacacctgaaatttcatggagattatgattcaataggtttgccaatacctaagaatctgtatgcctttacaaagctcaaatgattctcacaagtagtcaaatttaagagagctccaattacagaaattgtagttaagttggagtatgagacaatttacgtatagaataatcagtacagaattaggaaagtcatgtccgttgatctgtttttgaggatcacataagatttctatagctggagaaatgaaggcatggagaacatttcaggttaagggaaaaactggggcaaagcacaaaggcaggaagttaccaagtctatcaggggagagagggaaatcaatcaagaaaggaatgttgagccagaaaacagggtattgatgaataagctaataaatgagtttagactttaatcatctgggcctagcaaaataactgataaattttcaacagaagaatagtataatcaaactattactttatgaagaattatttagcaaacaagagttcacaagatggattatattagtgaaaacattggaagcttagaaacaacaataggggccatgataataactaaagcagaagtggcacactgaactaggaaagtggcagtggaaaaggggtactttagcaaaggaggccttggaaggaaagaacctgcacaactagggcactgatcatacatggaaagaaagaagaaggggtagttgactagctgtcgctaagtcatggaagatcagaggtgttattaaaacagaaagaattcaaaagttgagctaatttgacaatgtaggggtgtggttgggaagatggtaatttcaatgttagatttttttttttttgtatttgaggaacatctgactgaaaatatctggtatagagatgggagggtgatcaggccctttggttattgttgagctttttgactccatccctttctgcacaatgcagggcatggataagaaaatctccatgctccattctaatactcctattttttgaaattattccctcgaaggtggcattattcaaataacttaatattacaaagtcttaagttctttaacggttaattacagaatcccttcaccattttggtttttgcctccttagttattattcattatcatctttattgcaatttataatgcttctccagcacaatacctatatcattttgcatgtatcaattatgcctcctatttctgctgctgactctactctctgctccttttgaacagactctcggtcttctacatcccatgccatgcttttcctaggtaagaacatgagttttcataaggtacttccacttacagattgcctgagcaagaaaagaaacctcatatttacaggaaccctagcggtttcccgtgcagtgcagataatgcactcctaggtcttgttttttctgctaaaattgcaaagaggacaaaacaaatagcatgatgtgaatccattcttatgacagtgattataatgagaatgggaaatggtacaatttaagcatttgacacctgaagctctacttggtaaaatctaatctatttttcattagagtttcctctcagaagatcccatgggacaggagagaagcccctgctccgctcgcaatcagattagtccatctggattcctgccatctctcaatgctaacctcgaaacaacagtcacatgcagactgatactcaagtgactttttttgtttgtttcatccagggaagaaaatatagtccattgtggtaaaatatcatgttaacaatgcttgcagaaaagatactgctttcacaaaagctaaagggtggattttttatggtacttaactaaagaatccaaaaatttccaaatcatgccctgacgattgctctcttgccaagtaatatttctaaaagagcttaacatcaataaaattttaacaaatgattaataaaatccctcgtttttagctgagccttgcccaatactcctagaagacaagtgccaataataattgagtagtgacacacagcttagatccaaggcctttgtatgatcatatacatttcacatgcaagcctagatccaactttttccaccccctgagacaaagcaataaccaatattcaggtggagaaagaaaaaggaagatgactagccccattagtgggctgtctcagtttactagtttcaaggcctaaagaagtttactagtttcaattaccagattgaataatctgtaaaaaaacactgtaacaactaataaacaaattcagtaaagattcaggatacagaatcaatgtgcatagtaaaacacagctaccctgcctgctggtgaacctcatccaattaataacttgagtttgaagtcatggatcagtaaactatagctcacaggccaaatgcagccctctgtctgtttttgtaaaagttttatttgaacaccaccaggcccatttgcttacatgttgaaatgacatattgccaggggtggcacccaaagttcttggtctcatggtcaaggaaatcaaggatgtggacccaccaagggtgaggttacagtagaagtttaataggtgaaagagagagaacagctctctgttgcagagaggggtcctgaaaagggttgccattccacagtgaaatgcaagggtttttataaatgagctagtggagaaggggtatcttatctacatagggcacaaaaaaatggttaggaccaagtgtgccatctgcatagagcacaaatctctggcagcccccactccaaagttttattatgcaggtgggtcttttgcctgaaatattccatgttgctttcctactgtgcatgtgctaaaaaaggagaggaggagcttccatggtgaacatgcctggccacaggtacccctttctatctgtgcagctgcaggtatccctgcccccatgcaagctcccagcttctttatcaatgtttgcagcccgatcttccaggctgctctttgttagaaaagaagtgatttcttgggctgctttttgttagaagagaagttctgccaaggactctttgccctaacaatctgcctagctagcctccttttacctcctttctcagtgttgtctgtggctacttttactccatgatggcagaagtgaatagttgctacaaagactatgtggtctgcaaaacctaaaatatttattttctggccatttacagaaaaagtttgctaatttctgctctaaatgatatttataaatcatttatatgggaaagcaaggaaaaggcagagaaaaaaagaagagaagcaggggacattgccttcctagttaactatctcacttctgcttctgttactccattggtttagcaatcaagcccatctggggtgtggcttcccctcaggttcccctatggagccattggatatacagatacacaagagtcttgctttctctttctctttcatataatgttttcaatgagaccacagatttttttttcacttctgtgatctattcttgggacatacagaaagacatttatcacattattatttataatagacaaaaattggaaaaacctatatatacaacaatagagaaagagcagagccatatgttatagcattaaatacagtgtcttcaaagaatacagaatatattttatattaaaagttccaaataaaaggtgagatataaaattatctaatcagtgttttcaaaattttaaaagcaaacacatatatgcaggcacatatatacgaatagttaaatggatattgtgtgatgtgattgatttcttttttttttgaaatttccaaatttttatataataaataaagcatgagttatgtttaaaatattgagcattggctcaagaagctatttgaacaacccagattagagtgaagcaagtgaggtgttgagtttccaaccatttttaccaagctcttataaactttaattttaatgagaggctccagagctaagaaaaagttgaaaaccaccattcttcagcgtcttttcaaagcttctgtgtaataaattccaaaacctcttcttctagtccatgggtggtcaggaatacatttattcctggcttcttggattaatgatgaaaggagggtgttgtgtgagccatctcagaccctggggctccagtgttttaatctccagggaataaggccatactggtatagaattcagaactctggtaacttaaaatagtggaaaggaatcacaaaaataccttccttcataggcaccaccagagaaaaatggaaggaaagagggtagggcagctcatcattttctgactcttgaacctgttcccagggcaaaggaatgaccactgcagtcattctgtctagaaaaaaggactgttccaacaagtttcttgtcatctttttatcctctttttggtaattcctactgacattttaattttttttttactttttttgcttttaatttccttgatagaagaaaaaaaatttaagaaagaaagaaagaaagccctctagtgagcattgctttgatgggcagatttgcttcaatgagctatccagagtaatccccagcaatgttacacataatgaaatgcatcctctgtgttgaagagtcagcaatgcataaaattgagaagcaatttgcttccacctctgctctccataggtaactgttgcttcaggaacatgccaactatgctaaatgccatttactagcactgggcttacaagctgatttcagaaagtgtcactgtggcagcctgggaaggaaggccctccagtttcatacaggaatgagatgttcagcagcagtttgatgccaactagcttgaccaggctcccatatcagtgatgataaatattacctacacataaacacacacacacacacacacacacacacacacaccccacttcccttagagtctttcctcctcccactcaagttttaccaagcagttattttattcttactacaagtaagttggtactatatagcaacatttctcaataatggtcctctccatattctgggatcctgacatgcaacggaagcttaataaatatttgttgaaagaatccagatataggttagcactatagttttattcttacaaataaacattctttagttgattctactgtctcagttcaggtccaaagctagaatcacaaaccaggttgcccacaagaggaagagagaatccaaggcagacgatatctcaagtccaaacaggtaagtagaattagaatattccatataagaagagtaggcctgtagccattgggtgaaagctcagaggaagggctctgatttctaggaggacactaaggttaaagattagtacctagccctggtttacagtaatttttggcctcaggtcagactttttctggtattggagtaggcttgaatctacaaaaggtaattaagtattaaataagtaaagaggagagggatacagaagatggttaaaatggacaagttattacgcttgctccattaacatggaatacattgattagttgggaattgtgagtatcctgataatcaattttccccttaattttgtgagcacatatgtgtccttttcatgaacagcttcacttctcatactatccatcccaagaaacaaacttagatgccatatgaacttgttttgtcagaaaatgcccagagcctaatagctatatggactttaaaactttaattaatgtaatcacttacttcaacatttggtcttctttcccatgttatcttatttcattttcacaagaacgcattaaagtaggtattttattcccatttttacagatgaggaaagttaaatttgaagtgtgtgcacagaacggcagaacttggatccgaacccaaatctcttggatgccaaaacctacttttcggttgctcctctaaaattgttggaatcttgctaactggccacttaaccttttacactttcaattgaaaagttacaatttgaaatgtgtagagggaaacaagcagaggagccatgtgggaaagaagtcaatgtgaactcaaaaacttctacagcctcatcaagcaatgaaaacaaaccattgagctacaacaaatcaaaagggtttttcttccccacccccagccccattgtcctctctttacaaactcaatcaatgagttgaagctatattacccaataatgagccaaccatatttcagacaacacaaaaaaatattatcatagtcatgatctcctgaaatcccaccaccaagatagacattgatgataacactttggtgtacagtacagcctccccgtcagtgccatttatatatattagatataattatatgcactataactacatatataattgtatgcactataaataatttaaatatgcactataattaactaaaataataaactatttttatttttggcagttattataattttctctaatttgcaaggcatttatcccaactttttattttgaaaattttcatatgtatacaaaagtttaaagaattggtcactgaacaagaatatatccaccattgagatttaatattaattacatatctggctatatttaattactcacatatccatttatctatttttcctgtagatatctatcagtcaattctgatacattttaaagtaaatattacagataataataggtctaatctctaaatgttttagcatgtatatcagtaactagcatgcaataaaaatttctttatttacatctgtataaaatatacgttttctgaattatcaactgttttcttaaagtggggttttgaaaagagaattactgggtcaaaattcatgaatattttaaggctgttcacacatataaccaaattgcttttcaaaaaaattttgacaagttatacttttagcagcagtgcatgtgagtattcatctaactgtatccttgtgaattattaagtattaacttctttgttaatgtgataccaggaaaattggatattattgctagacttaatttgttgatttttgataagttgtagcatttttctttgtttatcatttataatcatttatcatttcttcagtgaattgtctaattcagatatgcctcttcttgcattcaaattttagtgtttttattatcaatttgtgtaagctttttgtacatcaaaactgttgacaaaagagtataaacagctttgaggaacttgatacatatatccaatttcttaaaatgaatatgacacattggcataataatgagaaataagacaggttcataaaatctctatctcccagtaatcaaatctccatttcccaataaccaaatgtcattcaaaaagaaaacaaaaataatacatttttcactccaagataagaaaaaaataaaggccaagatgattctaactgattctggtcttcaaaataataaaaccttaaatgttttctataaatctaaactaacaaaattattttcttgaattttggctatgctactgcctgaagataggtcatgacatttctgaatatgataatcatgtgagagcattgctgattttcactacgagcagaacaagataagcttagtaaccatgacagttttacattttgtttccttaaaatacttgttgtgttagggatgtgaaggacctcttcaaggagaactacaaaccactgctcaaggaaataagagagaacacaaacaaatggaaaaacattccatgatcatggataggaagaatcagtatcatgaaaatggccttactgcccaaagtaatttatagactcaatgctatccccatcaagctaccactgacttttttcacagaattggaaaaaatctactttaaactccatatggaaccaaaaaaagagcctgcatagccgagaaaatcctgggcaacaagaacaaagctggaggcatcacgctacctgacttcaaattatactacaaggctgcagtaaccaaaacagcatggtactggtaccaaaacagatatatagaccaatggaacagaacggaggcctcagaaagaacaccacacatctaccaccatctgatctttgacaaacctgacacacacagcaatggggaaaagattccctatttaataaatggtgttgggaaaactggctagctatatgcagaaaactaaaactggactccttccttacaccttatacaaaaatcaactcaagatggatcaaagatttaaacataagacccaggaccataaaaatcctagaagaatacatgggcaataccattcaggacataggcatgggcaaatacctcatgtccaaaacagcaaaagcaatggcaacaaaagccaaaattgacaaacgggatctaattaaactaaagagcttctgcacagcaaaagaaaccatcatcagagtgaataggcaacttatacaatgggagaaaatctttgcaatctatccatctgacaaagggctaatatccagaatctacaaagaacttaaacaaacttacaagaaaaaagcaaacaaccccatcaaaaaatgggcaaaagatatgaacagacacttctcaaaagaagacatttatgcatccaacagacatatgaaaaaaagctcatcatcaccgatcattagagaaatgcaaatgaaaaccacaatgagataccatctcatgcaggttagaatggcaatcattaaaaagtcaggaaacaacagatgctggggaggttatggaaaaataagaacacttttacaccattggtcgagtataaattagttcaacccttgtggaagacagtgtggtgattcctcaaggatctagaaccagaaataccatttgacctagcagtcccattactgggcacatacccaaaggattataaatcgttctactatgaagatacatgcacacgtatgtttactgcagcactattcacagtagcaaagacttagaaccaacccagatgtccatcaatgatagactggattaagaaaatgtggcacatatacaccatggaatactatgcagccataaaaaaggatgagttcacagcctttgcagggacatggatgaagctggaaaccatcattctcagcaaactatcacaggatcagaaaaccaaacaccacatgttctcactcataggtgggagttgaacaatgagaacacatggacacagggaggggaacatcacacactggagcctgcagtgggtggggggctgggggggggataacattaggagaaatacctaatgtaggtgacaggttgatgggtgcagcaaaccaccatggcacgtgtatacctatgtaacaaaactgcatgttctgcacatgtaattcagaacttcaagtataataaaaaaaaaagatacttgttgtattgtatatttcatgagctaatccatctgaagtctctgtcactctcctcccctcctcacaagtgaacttgtcctctctttatctaaatatatcactcctgagtcttttggacatcagcagtgatttaccagcagaattccagtaatgatggagtagcttctatattagattagtcctcttacaaatgacaattacaaactctagatcaaatttttaaaaacagctattgaaaggcataggcaagcaaccaaaatcatgcaaaacatggaaaagatttggcccctgaaagcgtaccatgttaagtgagattcacgtttatatggcttgctccatgatggtactctacaactgcaggtgtgaagtggttaaaactcatgatcaaggcatagattgcttgttttgttttgtttctgcccaaggaatcagaaaaaggagtttggaactgcaagagtgagtggaaattgaagggagaaattgcagataaaaaaaatccacagggacccaacttggcatgtgaactccccttcaaatgcttggctgacctctgtattgcacatgcatgggagagaggccaaagattccaaaggaaaaacaatagctggaaaccctaaagagctaaatgatgaaaaaaaagtgcaattctagtaccccaaattggagagacttggaaaacacctcaagctttccatggaagcccagaaagatctcccactttaggagtaaagacaacattccaggactaacagattttttcaagggccaagggtgaaaaaataaataggcattgtcttgcagattacaaaattaagccctcacaggttcaagatgatcagtcagtaatttaactgcctgctaaaaccaaactcgacattctccagtgaaagataacaggatctaaagcctctataaggtgtcattcagcacaccagtatcatcaaaattaccagatttggggggcacagagaacatagacccagtagtcaagaagaatgtcattcaacagaaacatacagatgctccctgagttacaatggggttaggttccaataaacccattgtaggttgaaaatatcataagtcagaaatgtgtatatttaatacacctaacttacccaacatcacagcttatgctagcctaccttaaatgtcctcaaaacacttacattagcctacaattgcctaaaatcatctaacacaaagcctattttataagaaagtgttgaaaaacctcagataatttattgaatgctggtcaaaaagtgaaaaacaaaatggttgtatggatacttaatgtatggcttccactgagcatgtatggcttacacaccatcattaagttgaaaaatcatcagtagaactattgtaagccagagaccatctgtattcagaacaaaccaggtgaaactatttttagatgggacaactaagataagaatgttaaatagtctacaggaaaagatagagatgtaagtgaagataatgaaaattttataagagagttgaacattgtaaaataaatctaataactaaacaatataatatcagaaatcaaaacttcatttaaaaaacttgattgaatgatattaacagcagattatacccaacaaaacaaaagttcagtgaacttgaagacaggtcgatgaaagtaatttaaaatgcataatgagaaaaaaagactagaaaaaaaaaactaacaaagcctcagttacatctgaacaatatcaagcactctaacatttatgtaattggagaggaagagaatagggtgagaaaaaaatacaaaaattttggtcaacttttctccaaatttgatcaaaaggagaaacccccaaatccaggaatatccatgaatgctaatcagaataaatacaaagaaaaccacacttatgttaatcagaggtaaacttctggaaaacaaagagttttctttaatcttaaaaacagcctttgagaaaaaaaaacccattacatacagggaacaatgaaaagactgacagctgacttcatattattatcacacaatgacaacttcaaggtgctaagataataaaactgtcaacctggagttccgtattcagtaaaattattcttcaaaaatggaggtaaagtaaaaatgctttcagaaaaaaagaaagctaagtgaatttattgccactagaaattttaccaaaaaatttggatctaccacaagtttatattttacacatatttttcaaaaatattttctgctttatgtttccttttaagattttatatttaaatatatttttacattttacataacaatatcgttcccttctttgtctcaatgtatgaattaacagtaataataatggatgacaagggatgtggttatgagacagttattacactaaactctttacccattatgacattttgtcctggcaacaaccctatacagtaaagtttattattattccaattacaagctttattattgcaatataatttgagatgaggaaacatgtggaagaactgtaatttgaactcagtaaatctaactccagagcctgaattcttaagcactatgctgtgttgcctctggaacatttattgagctattactacatgccagatactgtaaaaagggtgttgcattcattattaaatttaattcttaaaataaccctaggggatagtttcaagtcttcctcttattttacagattgcagaattgtgcatttggaaagattaatcaacctgcccaaatgtaaaaaccactaaatttctagggaaaattaaatcacaggttactgactctagaaccaagctcttaatcaaagcattctatactacctacatttatcctacaaattttattcccgtacaaagatcagagaagaaatcaccaacagtttcttacaatgtgggcatattttattacattaaaatctaatgtgttttttgaggatataaatgatgcaggatgagaacttagctgtgtactaagtttttagatatttgaaggtctgggtcatctagcctgttcattgattaatccatccacctctgtgccagtagtgtagccttttaattattgtggctttatggaaaagagttttgacagctaagcaccaaagaaattattcagttttccctgtactgtgatcttttgatatactgaggcaaaactccaaatgcagcctcaggaaggttacacaaatttcagctctcatagtagtttcctttagacagcaccaaaagtaggggaacttttgtggagttgaattgtgcatttactgttttaacaccctgctaacaaccaatcttcagcaaagcggtggtttttttactccattctgattgctagtgcaggagagacatcttatcatcatcatttagttccctgggaaaacaatagcaattgggcagcatagatttattagtgatagcaagagcaaaagctgcagaacacactgctcaatttttgcctcataattcttctaaattttcaatcattatttctttctcacttataaatttgtttttaatagaaagatcatgaacaagcatttgtctttattctgtcaccatgaaaggtcatttcccaggctggaatgtaaataaggctacgcaaaacttactctcatataatgggatttttttgtccagtcttttctattcccttctttcaaaattatgaacattttctagaacattgtcaaagataccctttgccctacacttacaaaaactataaatggtatggaaaagtcaagtttactttctgagctttctaataaacatttctggaaaggtcatctgtcccatagaagcccacagacacagcatatggggtccttggcatgctgtgacagcttggatgtcacttctgctgatacagtccccatatttatggtcaaaaatgacacccatggtttacctgcacccatagctatcagaaacaactcacttccaacctgctattcccaaatcaaaatgagacaaaatgtaagattcttgtgcactgccactgttgacactatggagtgaccattacaaaatttaaagctatttctctaacctctggtgtaaacatctacaacatacttttgttgtatttattatgttcactgttattgaggcaggagaatagggcctggaggcagggaacctaaggacttcctagaactaaatcaaatgaaaatactgcagctatgacaggaaatatcctcttcatttacatagggtgtacatggagtaaatgactttgtaactttacttcatcctctccatttacatacggcgtacaccaagtaaccagtggaaacctttagaggatatttaaaccccagaaaattctgtagcgagtctcttgagtccctatgctcgggcctgctcccaccctgtggagcgtactttcgttttcaataaatctctgcttttgttgcttcattctttccttgccttgtttgtgcatttaatccaattctttgtttaagacgccaagaacctggacaccttcgaccggtaacaatatgatcatctctcagccccttcctctttattgctgccctcatttcttcttcctctcctctttcttctagacttcatggcttttttcttctagcggtcatgccctaacatctttcatctctgatttcggtttattttttgctcccaaattcataatcttctttcacaccatgtatctctcatcttgattcctactgttaatctttatctttcttcttactcaaatagaatctattcttcaagaatgtactcaaatgaagccatttctgacctctcccactcacattggttgctattaaatgtatagcttgaaccatactacttttcacttcgttttatttactgtataaaattataaaatgttggagctgaaagggatctcaaaatcagttattcaacacacaaaaaaagtgtagaaaagtaggggtaataataataagcacaaagaaagatgatataaagaagtcctaatatatcagtaattacagattaaacttgcaattggaccaaacaattggactaaacttgtcaaagacagaaattgtcagactggattgtttttaaaatcagaaaatggcatagaaagaaaattaaaggacaaaaagtatgccagtaaaatactttaaaaatagtttgcataaagatattcacataagaagaatgaactttaagagaaaacctttataagtgatagccactaatactgatatgtattccccttgaagatataacagttctaaacttgtataatcctaataaaaatgctgaaaaagatcctcttcttttacaaaaactttagtcccactcttctgggtcctgtgcttgaccatgctataccttgggcttccctctgttctcacagaatctggttttgcaaaaccaaattaatatgtgaccacttaatcacccctaatatgtgacctctctcgacatcttatcaccctggcttgcctttaacaagaattctgttatctgcttagcaagaattaccctcctacccctgttgtttcctctggataattttccatccgctgaccctgactctgctcctcggttataaatcctacatgttcttgttggactcagagttgagtttaatctctctcccccaccacaagaccccattgctggggttcctgtatctattgctatggcccccttgaagagtctttcttacctcctttaacaagtgtaataagtaattttttctttaacaatgttccaaaatatatcagcaaaaaccaataagattgcagaaaaaaattaaaaaccatcatcatagtggaagacttcaacatacctcccacattactgatacactaaacatataaaaactaataaagatgttaccagaaagggttccagatccagaccgcaagagagggttcttggatcttgcacaagaaagaattcagagtgagtccatagagtaaagtgaaagcaagtttatttattaggaaagtgaaggaattaaagattggctactccatagacagagcagccctgagggctgttggttgtccacttttatggttatttcttgatgatatgataaaaaaaaaaagggtggattattcatgcctttcttttttagaccgtataggctaacttcctgatgttgccatggcatttgtaaactgtcctggtgctggagggagtgtagcagtgaggacaaccagaggtcactctccttgccattttggttttggtgggttttagccggcttctttactgcaacctgttttagcagcaaggttttaatgatctatatcttgctctgacttcttatcccatcctgtgacttagaatgcctaaccatctgggaatgctgtccagtaggtttcagccttattttagccagttcttattcaagatagaattgctctggttcaaatgcctctgacaaagatactaaaaatttgaacaacataaataacataattgagtacttgacgtacatacatcagtacctattaattaaggaatacacattgctatggactgaatgtttctgtcctcctacaaatttatgtgttgaagccctaatcccctgtaaaagaaaaataaatctcaggaccccaaagtcactaagccaagggaaaagtcaagctaagaactacatcaggcaaatctgcctcccattttactcctaaataatataggtacaaatatagaaaagatacatacctccctcacaattttcccatgaggaaattccttgtggacaaagggcagacagaactcaaagtcatccctctgaggctcatgtgagatgaatgcatatctggtggcttcctctttcctattgtttcactaagccagaccaaggcataagtgactatttcttctacccttctctcacacataaattgtgtattcagtgaaaggctaatcaaagactcaaagaatgcaatcatctgtctctcatctacctataacctggaagcccccttccccgccttgagttgtcctgactttctggactgaaccaatgtacatcttacacatattgattgatgtctcgtgtctccttaaaatgtataaaatcaagctgtgcccccaccaccttgggcacatgtcctcagaacctcttgaggctgtgtcatgggtgcatcctcaaccttggcaagaaaaactttctgaattaattgagacttgtctcagataccttttgggttataccctaatgggatgctatttggagatagggcatttgggaggtatttagagttagattaactcatgggagtaggacctttaaaatggcagtagtggccttataagaagagaaaaatcgatctctctctctctctctctttttttctatgtctcttttcctctctctcttgctgtctcctccaccaccttccccccaatgctacctgcactgagtaaaggccatgtgagtacacagcaagagggcttccaggaaggctgcctgcaagcaagctaggaagagagctcttaccaggaatggagttggctagcgcattgatctccagaactacagtttccagaactgtaagaaataaattcctgtcatttaagccatccagtctatagtatttaattatggcagcctgagaagactaagatacaattcttcttatgtgcactagggacatctgcatttgcaaatattatccataggtacagtctcaacaaatttcaaagaattcatatcatacagattatgtcttcctaccacaatgcaattaagttagaaatcaataataaaaagaaaaatttgagaatcttcctatatttggaaattttaaaacatcttttttttttttttgagatggaatctcactctgtcaccaggctggaatgcagtggcacgatctcggctcacttcaatctccgactccctggttcaagcaattctcctgcctcagcctctctagtagctgggattacaggcacatgccaccatgcccagctaatttttgtatttttagtagagatggggtttcaccatgttggccaggatggtctcgatctcctgacctcgtgatccacctgcctcggcctcccaaagtgctgggattacaggcgtgagccaccacacctgccccaaaacatctcttttaaataactgaaaagttgaaaaaaatcataaagggaatgttaaaatacttagaagaaaataattaaaataattacatgtaaaaacttgtggaatactgttaaagtgatacttagagggaaattttagatttaatataagcatatactaggatagataaaagctgaaattaatgagtgaaacgtaagaaaaatttttttaagttaccaagttgaaagcagggttaataaaacagaaaacaaagagtcattagagagcatcatgaaagaagacaaattcaactccttaaagagaaaagctcaataattctctggaggattaatctacaaaaagagagacaaagagaaggaacaaactaaaatgtgatttaaacggaagaatagtccaggggcaatggctcatgactacaatcccagcactttgagaggtcgagggaggatcacttgaggccaggagttcgagaccagcctgagcaatatagtgaaacccaatctccatgaaaaatttaaacaataaaaaaaatagctgggtatggtggcacgccctgtagtcctatatacttgggaggctggggtgggaggattgcttgagcccagaagtttcaggatgcagtgagctatgatcgtgtcactgcactccagtctgaacaacaggaccctgtctctgaaaacataaataaataacataaaataaactaggaacaactaccactacattacagacttttttaatgctaagagagcactataaaaaaaaaactatgccagacacttttgaaaacttagatgaaatgaaaatatactagaaaaaaataataacttaccaaaacagatttgaaaagatatagaatagttgcataactttatgaagtcacataaaaatttcaggctcaggtaatattgcaggaaatttccaccaaacttcaaaaatacttgcaattttaaaattacacaaaatcttccagaaaatagaaaaataagcaacacttatggaatataattttttcaaatgttcagtttctcaatatgatcatgtgaaataagaaatagttacacattggtcagtttgtaataactctgcctttgaatttttatttttaatcttcatgtttgcttatcaagtttctctctctgtttgtacacagaaatctaagagcattattatttcattagcaccaccaatttgaaatatataaataagtcccaatttttcaaaataaactcaagggttaaagagttaaattactatattttaccataggaagatagaaaaaaatcaaaatattatttatcaattctttgaagaaatgatcacttcctctatttgaagtaagctaagaaatcataaagacaattgaaaatatgtttgatcatctaaaattaaaagtattttgcattaaaaataaaagattaaaagaaaaactaaaataggaagatgtttgcagcaaattgttactatatattataagacaatatctcaacccaccattagataaaatgggcaatgaatagaggcacaatgaaagttctaataaacaaatatatagaaaatgttcaaccttgtttttcataaacatctaaagtcaacctttagataacaatttatagctattaaattattctgaagttttaaatattcacactgaaaaactggcaatattgtgtcaactttgccatactcctatgtgctgattggcactaagagatggaaaaatttcaataattttttgaatctactaggaaatgctttctaaagaaatgaaagaaaaaaaaaacaatagctaaatgctatatccatgggataatgcaccaacacctgtaacagcaaatatttgaaaacaatttaaatgtccatgtaaatgatagcccattaaattaatggaataatgtaagatactgccaaaatattattaagtaccaattacaagaggtaatgataaatatgacataacatcattggaagtgttaatgacataatgttaagtaaaaaacatagattctaaatctgtctgatcattaggataataactacaaacaatatatgctactggattcagaaggatatctgaaaacaagtaagtcaattattggattaggatagtggcatagtaagtgatttatatttcgttgtttacattttctttcattttgttgtaaaattgcctttaaatttttttaaggaaattgttttaatgagggagagatagcgcaagctggccttccaaacccaggaactttagcatggacattaatcacagtaaatggatttgaaagatgatcattaaacttccaacagatttattaaatgataatgtcagagcatttggccacacatatgcttttgggtagctcatcagtacaaacaattttccagaatgcagttgcccttttcatttaattaaattcatgtacaaaccaaagaaataccaaaaggcccagtgctatttccataggagatttgatatggctaatatagagttctatagcttataaggcatagatatatcttccccagcaagagtctatttcacaatttgccagtttgtgtgattattcaagaattgccattatgtgtgatttggtcatagagataatggatacacacagacattaaggaggatactaaacatatctgtattggacttaccctaagaggatgactgactctttgccaatacaagtcaaatttcctgaatataactagaggccagtaatttataggaccctccatttatattctattttcctctctccaccgctaatcttttccatcatcacatgaaaattctttgacccctatgttggggtacagcaagaagagaaagtgaagtgtggaggttaaaaaaaaaaaaaagtatccttacagcatagaggatcttctgcatgggagaatctttcctcagctacagtttgacttccaggtacttccattataaagatgttgcttcaaaattgattgagagtggaggaagcttttggatttaatgttgtagaataaataactacctgtgagataatcactgttaaaatggagacattataaagaaaataatagctaatatttatagcacaaatgatgctttatgaaatgcctttgcaggtattcttttgtttcatttttacagcaactttgcattccaaaaaatatgattattctcgttttacagataataaaaataggctcaaagagatgatcaatagatgaacaaaactacagggacttacaatagatgaacccaactatgagtatttatatgtaagtacctttatgtggaaaagatgtattgtgagatataaacttatctccaaataattcaagtatgaagtcatatagccaggattcaagcacaggtctttcgactccaaatcccatgctcttttgcaaataagcagtgatactcttcttagggagagatgccttttttcccggtctttagcaaataaacatgtatatgtgtcaggaagtgtagcagggtgaataaattttcacttaaaaccttaagctgactttaatagcttctgtgctttgtaaagaaagcaagaaagtgtggagagcctagcttaaatcataccaactgaaaaagaaatccttatgcactcattaaagagaagagaggaaactgaaatcttaaaggcgtctgccagctcttctgttggactaaagggttagattactctttattttggaaaagcctatgaatgagtctttgaaaatgcaaaagtagatccaaactgagtggaagagtggaaagataagttattctgtttaataacgtgagggaaattggatctaaagagggggaaaggggactgtagtgatgtggtagatggacccttaaatcatttaatattcagttttaagtttattgtctgtgaagtgctagccctccatcatcctggaccttctcgaagtctgcacgcacacatacacatgcggatacacagacattcttgcacacacacatacacacacacaaaaatgctttgcatcaaggatttggagaacaaagaaaaaagctaagtttcctatttgattgactgtgcagcagaaagaagagtcacaggagtcaaattgtagtcggattgaaaattcaatgtgaaaatgagatgatcagaacatagtccctaggaatctgccaaagtgtgtaggaaagtattatacttaaatcagaccttaaatctcaaaaaataggtcgacttcacaacatctgggtaaaaaatatatgtctgggtgaaagtatcctttatgtgtagttacctatatttagaaaagatggacatgagccctccatcgtttagtttatccaattatttaacaaatatttattcagtgttatcaattgccaggaattacagttagacactaatgtctgggagagttagacatagctccttttcttaagaactgcatggttcaatgtgtgagaaagattagaaaatgacaattgaactgcacagtgactttgacagcaaaaactctaaaagaatcatcctttttctgacaagagaactgagaaaaaggactcctgcaaggcaatcagtatgtgagaaattcctagtttggcttttttaaatttttttttaaccctctctctctctttttctctctgggacttgcccctaggtcagcccaagtcacagagccacactgcgaacttgatggtgatggttgtgtgggtatctgaatccctgagagaaaaccatctctctggccaaaggagatgaggaaaatgatgtttgttttccaaagagtgtaaggagaaatccctgtgaaatttcctctctctttcctcttgttgcatcatactgaggacagtcccagttgtgtggaaatacaagacagtgcaaggggaacccagtttttcctgctattctggaaggaaaaactaagatagcaggctcccaggagctgaggagttcaagcaaggctgggactaggatgatgcaaggtaggcacctaaggagaaaattttaagaggtgtttaaaaaaaaattcaatgatgcttattaaggaacagtaaggaagatttcattcaggaccattgcgataggtgtagtgaccatcacgataaagggatttttgcagtaagggacagagattggactcaacttcaaatatagcatgggccagcgggaatttatatctaaggagcagagtgagggtcagtggatggaaaattactaagaggaagcatcgggtaagggaaattctagctaaagcaaactaacagaacttatgctaaagacaggcttgggtgatcagacattgcctagggcaaggtggaggaagaggaacaggatcagacatcaagagtgatcagataatgagagtaaaggttgatactaaactgacttagcagggttctttggtaaaactggattttacaaggaagtacacaaatgggcagaggagaaagttcaggagcccgactaaagtttggacaagcaaagaatcttcatgagaggtcactggctttcagggctgatcaactgccaacactgtacatacatcaccttgagagtgagtgcttcctgaaattttgcactctaggagtctcattgttaagaaaaaatcttgaatgcaaccagaagaaaaaaatgaaaccttggataaaataaaacaaaatgatccaaatgaatatggatttctcatcagaaactttcaaagccagaggcagcaaaagaacatctttaaactgttgaaaggaaaaaagctgtttatctagaattctatatcctgtgaaaatatccttcaaaataaagaaaaaataattttcagaagaaggaatgcttgtgaagtttcagatgaaaaaccaacaaaccttttctaaaatgaatgcaaaaggaagttcttcaggttgaagaaatatgataccctatagaaacttggaactttaggaatgaagaaaaagcagtaacaatggtaaatatctggggaaatgtaatagactctttttctccccttgagttgttaatttctcttatgagcacaaataaatgaaactaaaatagaaaaacaacagagaaaacaataatatcaaaagctggtcctttgaaaagattaatgaaatgtataatcctcaagaaagactgatgaaaaacaaaaggtgaagatacaatttaccaatatcaggaatgaaagcagtatatcactaaagacagcacaaatattaaaatgataaaaaggagcaactacaaacaatcccataaattcaacaacataaatgaaatggcctgtgatgttaatactgagtgtcaacttgattggattgaaggatccaaagtattgatcctgagtgtgtctgtgagggtgttgccaaaggagattaacatttgagtcagtgggctgggaaaggcagacccatccttaatctgggtcagcacaatctaatcagctgccagcacagctagaataaaaagcaggcagaaaaatgtgaaaagagagattggcctaacctaccagcctacatcttctcctgtgctggttgcttcctgccctcaaacatcagactccaggttcttcagttttggaactcaaactgaacctccttgctcctcagcctgcagacagcctattgtgggaccttgtgatcgtgtgagttaatacttaataaacttcactttatatatatagatatagatatatttatatagatagatataaatatagatataaatatttatatatatatatggttctctagagaaccccaatacagattttggtaccaggagtggttttagaggaacagaatactaaggatggagttatttcattggttttggggtctctggagttggctgcttaatatgattagacccaaaattgctaacgactgtacttccaatagtatagagaacactgatagtccttggtgtcaactgtttagagagttatgcaaaataaatgcattcgacactcctgattcatcgcttatgagaggcaaggagtttaatgactctgtacataatacctttgaccatatgtggagaaacaagaaacataatgaagctgattggttcgtcctaagttcagtagacaaagtgataaaagaaaatgatgaactcagggattctatctcctggcttcagaagcagatactgggccctcgatatggtgccattccttggggtgatcagccagctacctggaggcaggttgattatattgaacctcttccatcatggaaagggcagaggtttgtgcttactggaatagatacttactctgcacatgggtttgcctatcctgcacacaatgtttctgccaaggctaccatcaatggactcacagaatgccttctccactgtcatggtattacacacagcattgcctctcaccaaggcactcactttatggctaaagaagtgtggcagtgggctcaggctcttggaattcactggtcttaccatgttccctatcaccctgaaacaggtggattcatagaatggtggaatggccttttgaagtcagaattacaatgtgaactaggtgacaatactttccaggactgggggaaaagttctccagaaggccatgtatgctctgaatcagtgtccagtatatggtactgtttctcccaaaggcaggattcatgagtccaggaatcaaggggtggaagtggaagtggcaccactcaccatcacccttagtaatccgctagcaaaagttttgcttcctgttcctacaacattatgttcgttcattctcctggcctagaggtcttagttccagagggaggaatgctgtcaccaggagacaaaatgattccattaaactggaagttaagattgccacctggacactttgggcttctcctacctttaagtcaacatgctaaaaagagagttacggtgttggctggggcgattgacccagattatcaagatgaaatcagtctactactccacaacagaggtaaagaggagtatgcattgggtgtacaggagatccattgggtgtctcttagtattaccatgtcctgtgattaaggtcaatgggaaactacaacagcccaatccaggcagaactacaaatgacccaggcccttccagaatgaaagtttgggtcactccaccaggaaaaaatccacaactgctgaggcgcttgctaaaggcaaagggaatacagaatgtatagtagaaggtagtcatcaataccagctacgaacacatgactagctgcagaaccaaggattgtaattgtcatgagtatgtcctccttcttttgttaaaaacatgtttgtgcatgtatatacttgtactaagaaaatatcttcattttatttcctttctcctttatcatgtgacataagatttattgacttcacatcagcatttaagtattgttaactttatataatagtatttgggttggggattggggcatttccagttgtatgaaggatagttgtattatgttaggcataactaggaccttatagtctttattgaagattacgtataatctcaggagatgtgtatgggttcaagttgacaaggggtggacttgtggtggttaatactgagtgtcaacttgattggagtgaagaatacaaagtattgattctggatgtctctgtaaggttgttgccaaaggagattaacatcagagtcagtgggctgggaaaggcagacccacccttaatctgggtcagcacaatctaatcagctgccagcacagctagagtaaaaactaggcagaaaaatgtgaaaagagacacaggcctaacctcccagcttacatcttttccctgtgctggatgcttcctgccctcaaacatcagactccaagttcttcagttttggaactcagactggctccccttgctcctcagcctgcagatggcctattgtgggaccttgtgatcatgtgagttaatacttaataaactcccctttatatatatatatatatatatatatatatatatatatacacacacacacacacacacacacacatatacgtatatatttatacacatatatatacgtatatatatatacacatatatatatacgtatatatatgaaactaaaatagaaaaacaacagagaaaacaatgatatcaatagctggcccttttggaatatatatatatattccattagttgtgtccctctagagaactctgactaatacatggtccaaaggcctttaaaaatacaaactaccaaaagtcatttaagaaaaaatacataactggaattgtactacagccactaaacaaattaaattactagtttaaaaccttataacaaactccagtcccagattatttcactggccaattctactaaacatttcttagtagaattttcttaaagaaatttcttcatgtccttaaagaaagacataaaatttatacaataatttctataaaataaaaaaggaaagaatacctccaaattatttcatgtagccagcattagcttactaccaaacccaaagacattacacaaaaagaaaatccagtgcattaatgtaaatttaaaagccataaaaatagagtttaaaatattagcaaataaaatcaagcaatatatacaatggataatacatcatgacaaaattgggtttatcccagaaatgcaaagttgttttaacattcaaaattcattcaatgtaattcatcatattagcagactaaagaagaaaacctacatgatcgttttaatggtgcagaaaaatcagttgagaaaattcatatccagtaatgacacttttgaaaaaaaaacctctcagcaatgatgaatgcacaggaagttctttatcctgataaaagtcatctaccaagaaaatatatagtacataacatatattaatacatatattaatgataaaagactaaatttttttcctaaaatcagaaataaggtaagatagatgctcctattcaatattgtgctgtacaatctaaccagtgccacgaagtgaggagaagaaaaaggtatataaattgtaaagaagaaagaaaatgccctctgttcgcagatactatgattgtatatatcaaaaatccaagggaatctacaaaagagctccaagaaatactaaatgagtttagcgaggtgctagggttcaaggccaatatacaaaaattaatagtattcctacatattagcaatgaataattgaaagtcaaaattagaaacagtgccatttacaataacacaataagcagataaatttaacaaaatgtgtacagaaccaatatgatgaaaaatataaaacactgataaaagcaatcaaagatctaaacaaatgaaaagatatacaatatctatggattagaaaagtcaatattgttaagatatcgatttttttcaacctgatatatagaatcaatgcaatcccatggaaatcccacagtccttttctaagtattgacaagtagattctaaaattgatatgggaaggcaaaggtactaaaatgaccaaattatttctgaagaagaaaaaagccggaagattcacattacctaatttcaggacttactataaagtgacagtaattggccaggcatggtggctcatacctgtaatcccagcactttgggagacagagacaggaagattatttgaagcgaggtcaggagtttgagttagtaattaagacagtgtagtcctagtgaaaggatagccacataggtaaataaaacagaacaggcagtcataaatagacccactcatatatggacaattgatttgtggcaaaattgcaaaagaaatttagtggagaaaggagagtcttttactaatggtgctggaacaattggatgttcatatgtgcaaaaaaaaaaattcatcacagcctgtatcttacctttcctatgaaaaattaactcaaaatagatctgatgtaaaatgtaaaactataaaaatgttagaaaaaaacataggagatctttgtgccctcaggttaaacaaggagttctcagatatgataccaaaggtgtgattcataaaaggaaaatcatgataaattgaattttatcaaaatttaaaacctttgacctattaaaatacaagccatagatgaggggaaaatatttccaagtcatctatctgacaagcaacttgtaaacagaatccacaaaaaattcttaaaacttaacaattagaaaacaaaccactcaatttaaaagtgggcataagatctgaacagacacttcaccaaagcatatatgcagatggaaaataaactataaaaagataatcaacatcattgaaaatataaagagacacaactatatatcaaattgaatagctaaaatataaaaaactaataaaataaagtgcagttaggatgtggagcatcggtaaatctcatacatttactggtagaaataaaaagtgatagggtctgttccaagatggctgaataggaacagctctggtctgcagctcctagtgtgattgatgcagaagacaggtgatttctgcatttccaactgaggtacttttttcatctcattgggactggttggacagtgggtgcagcccacacggggtggccaaagcagggtggggcatcacctcacccaggaatcacagcagtctagggatttctctttcctagccaaagaagccatgacagactgtacctggaaaaacgggacacttccacccaaatactgcacttttcccatggtcttagcaaccagcagaccaggagattctctcttgtgcctggctcagtgggtcccatgtccacagagccatgttcactgctagcgcagcagtctgagatccaactgcgaggctgcagcctggcagggggaggggcacccaccattgctgagacttgagtaggtaaacaaagcagctggcaaactcgaactgggcagagcccaccacagcctagcaaggcctgctgcctctatagactccaactctgtgagcaggacatagctgaacaaaaggcagcagaaacttctgcaaacttaaacgtccctgtctgacagctctgaagagaacagtggttctcccagcatggtgtttgaactctgagaacggacagactagctcctcaagtgggtccctgacccccgtgtagcctaactgggagacacatcccaggaggggccaacagacacctcatacaggcatgggtgcccctctgggatgaagcttccagaggaaggatcaggcagcaatatttgctgttctgcaatatttactgttctgcagcctccgctggtgatacccaggcaaatagggtgtgtagtagacctccagcaaactccaaaagacctgcaaatgagggacctgactgtcagaaggaaaactaacaaacagaaaagaatagcatcaacatcaacaaaaaggacatccacaccaaaaccccatctgtatgtcaccaacatcaaagaccaaaggtagataaaaccacaaagatggggagaaaccagggcagaaaagcggaaaattctgaaaacctgagcacctattctcctccagaagatcgcagctcctcaccagcaatggaacaaagctgaaaggagaatgactttgacaagctgacagaagtaggcttcagaaggtcagtaataacaaaattctccaagctaaaggagcatgttctaatccatcacaaggaagctaaaaaccttgaaaaagggttagatgaatggctaactagaataaacagcatagagaagatcttaaatgacttgatggagctgaaaaccatggcacaagaacttcatgatgcatgcacaagcttcaatagctgactcgatcaagtggaagaaaggatatcagtgttgaagatcaaattaatgaaataaagtgagaaggcaagattagagaaaaaagagtgaaaacaaatgaacaaagcctccaagaaatatgggaccatgtgaaaagaccaaatctacatttgattggtgtacctgaaagtgacggggagaatgtaaccaagttggaaaacattcttcaggacattatacaggagaacttccccaacatagcaaggcagaccaacattcaaattcaggaaatgcagagaacaccacaaagatactcctcgagaagagcgatctcaagacacataattgtcagattcaacaaggttgaaatgaaggagaaaatgttaagggcagccagagagaaaggtcgggttacccacaacgggaagcccatcagattaacagaagatctcttggcaaaaaccctacaagccagaagagagtgggggccaatatttaacattcttaaagaaaagaattttcaaaccagaatttcatatccagctaaactaagcttcataagtgaaggagaaataaaatcctttacagacaagcaaatgctgagagattttgtcaccaccagacctgccttacaagagcacctgagggaagcactaaacatggaaaggaacaaccggtaccagacactgcaaaatcatgtcaaattgtaaagaccatcaatgctaggaagaaactgcatcaattaatgggcaaaataaccagctaacatcataatgacaggatcaaattcaaacataaaaattatagccttaaatgtaaataggctaaatgccccaattaaaagacacagactggcaaattagataaagagtcaagacccatcagtgtgctgtactcaggagacccatctcacatgcaaagacacacataagctcaaaattaagagatggaggaagatctaccaagcaaatggaaagcaaaaaatagcagggcaggggttgcaatcctagtctctgataaaacagactttaaaccaacaaagatcaaaagagacaaagaaggccattacataatggtaaagggatcaattcaacaagaagagctaactctcctaaatatatatgcatccaatacaggagcacccagattcataaagcaagtctttagagacctacaaagagacttagactcccacacaataataatgggagactttaacaccccactgtcaatattagacagatcaatgagacagaaggttaacaaggatatccaggacttgaactcagctctgcaccaaggagacccaatagacatctacagaattctccaccccaaatcaacagaatatacattcttctcagcactacattgcacttattctaaaattgaccatacaattggaagtaaagcactcctcagcaaatgtaaaagaacagaaatcacaacaaactgtctttcagactacagtgtaatcaaagtgtaatcaaattaaaactcagaattaagaaactcactcaaaactgcacaactacatggaaactggacaacctgctactgaatgactactgggtaaataacgaaatgaaggcagaaataaagatgttcttgaaaccagtgagaacaaagacacaatgtcccagaaactctgggacacatttaaagcagtgtgtagagggaaatttatagcactaaatgcccacaagagaaagcaggaaagatctaaaattgacaccctaacatcacaattaaaagaactagaaaagcaagagcaaacacattcaaaagctagcagaaggcaagaaataactaagataagagcagaactgaaggagatagagacacaaaaaacccttcaaaaaatcaatgaatccaggagctggtttttttagatcaacaaaattgatagacctctagcaagactaataaagatgagagaagaatcaaattgatgcaataaaaaatgataaaggggatataaccaccaatcccacagaaatacaaactactatcagagaatactataaacacctctatgcaaataaactagaaaatctagaagatatggataaattcctggatacatacaccctcccaagattaaaccagcaagaagttgaacctctgaatagaccaaaaacaggctctgaaattgaggcaataattaacagcctaccaaccaaaaatgtccaggaccagacagattcacagcttaattctaccagaggtacaaagaggacctggtaccattccttgtgaacctattccaatcaatagaaaaagaaggaattttccctaactcatttaatgaggccagcatcatcctgataccaaagcctggcagagatacaacaaaaaaagagaattttataccaatatccctgatgaacatcaatgcaaaaatcctcaataaaatactggcaaactgaatccagcagcatatcaaaaagcttatccaccatgatcaaattggcttcatccctgggatgcaaggctgattcaacatacacaaatcaataaacgtaatccatcacataaacagaaccaacaacaaaaaccacatgattatctcaatagttgcagaaaaggccttcgacaaaattcaacagcccttcatgctaaaaactctcaacaaattaggtattgatggcatgtatctcaaaataataagagctatttacgacaaacccacagccaatatcatactgaatgggcaaaaactgggagcactccctttaaaaaccagtacaagacaaggatgccctctctcaccattcctattcaacatagtgttggaagttctggccagggcaatcagggaagagaaagaaataaagggtattcaattaggaaaagaggaaatcaaattgtccctgtttgcagatgacatgattgtatatttagaaaaccccatcgtctcagcccaaaatctccttaagctgataagcaacttcaacaaagtctcaggatacaaaatcgatgtgcaaaaacacaagcattcctatacaccaataatagacagagagccaaatcatgagtgaattcccattctcaattgcttcaaagagaataaaatacctaggaatccaacttacaagggatgtgaaggacctcttcaaggagaactacaaaccactgctcaatgaaataaaagaggacacaaacaaatggaagaacattccatgctcatggataggaagaatcaatatcatgaaaatggccatactgcccaaggtaatttatagattcaatgtcatccccatcaagctcccaatgactttcttcacagaattggaagaaactaaagttcatacggaaccaaaaaagagcctgcatagccaagacaatcctaagcaaaaagaacaaagctggaggcatcacactacctgacttcaaactatactacaaggctacagtaaccaaaacagcatgatactggtaccaaaacagatatatagatgaatggaacagaacagaggcctcagaaataacaccaaacatctacaaccatctgatctttgacaaacctgacaaaaacaagaaatgtgggaaggattccctattcaataaatggtgctgggaaaactggctagccatatgtagaaagctgaaagtggatcccttccttaaaccttgtacaaaaattaattcaagatggattaaagacttaaatgttagacataaaatcataaaaaccctagaagaaaaccttggcaataccattcaggacataggcatggacaaagacttcatgactaaaacaccaaaagcaatgtcaacaaaagccaaactagacaaatgggatctaattaaactaaagagcttctgcacagcaaaagaaactaccatcagagtgaacaggaaacctacagaatgggagaaaatttttgcattctacccatctgacaaaggactaatatccagaatctgcaaagaacttaaacaaatttacaagaagaaaacaaacaaccctatcaaaaagtgggcaaaagatatggatggacacttctcaaatgaagacatttatgcagccaacagacacatgaaaaaatgctcatcatcactggtcatcagataaatgcaaatcaaaaccacaatgagataccatctcacaccagttagaatggcgatcattaaaaagtcaggaaacaacagatgctggagaggatatggagaaataggaatgcttttacactgttggtgggagtgtaaattagttcaaacattgtggaagacagtctggcgattcctcaaggatctagaactagaaataccatttgaccctgcgatcccattacggggtatacacccaaaggattatacatcatgctactataaaaacacatgcacacatatgtttattgcggcactattcgcaaaagcaaagacttggaaccaacccacttgtccatcagtgatagactagattaagaaaatgtggcacatatacaccgtaagatactatgcagccaaaaaaaaaggatgagttcatgtcctttgcacggacatgtatgaagctggaaaccatcattctcagcaaactgtcacaaggacagaaaaccaaacattgcatgttctcactcataggtgggaactgaacaatgagaacacttggacacagggcagaggacatcacacaccagggcctgttgggagctgggggagggatagcattaggagaaatacctaacgtaaatgatgagttgatgggtgcagcaaaccaacatggcacatgtatacctatgtagcaaacctgcacgttgtgcacatgtaccctagaatttaatgcataagagagaagaaagaaagaaagaaagaaagaaagaaagaaagaaagaaagaaagaaagaaagaaagaaagaaagaaagaaaaagctgtgcagctactttggaaaatagtgtggtagtttgttataattaactatatacataccatactacccagtaatgtcactccctaggtatttacccaagaaatatagaaatttatgctaacagaaaaatttgtatgctaatatttatcagttttattcataattaccaaaaactggaaacaactgagctgtccttcaacttgtgaatgaatgaatgaatgaatgaatgaatgaataaacaatttgtatgcagccaccaaatggaatactattcagcaatgaaaaggaatgaactgttgactctcacaacaacatggatcaattcccattttgttaagcaaaacaataaaaattaaaaagccatactcaaaaaactccatattatatggttttattatatgacattctgaatagcaaaaactgttggcacagaaaagaaatctatgtttgccaaagtttggggctagatgaagaagttttgacaacatggaagtaataaggagaatttttttttggtaatagaactgtgttatgagtgtaatagtggatgtacaactccatgcatagaatttacactacagagtgaattttactgcatgtagctttttttaaacacctacatagtcctgaacatacagaaaaatgaaagatagaccattaacactttatccccagaaaaagttaatagaaaccatgcccaaacaccaggtccctagaccattataagaacattaacatctagcttttgtaaaaattttcataatggcatatgaaattaaattaacagtcaatgtttccatacctaattttaacctttaactcaaaatgtatgtgatttaatccaatgataaagctcattgtgcagacagaacatttaattttgccctcttaaaattactgcacttctgaataaaacattagaggcacttaatggaaaggtgttaagttcattgactttgttattattaccataattaaggcaaaatatacccagctaaaaaggttttgccaagataatgaacatttcttaattgcctcagtgtttgtagcaaaccaactttatgttaaactcaagttccccttgtcacaccaagcacttaatcagaaagaaacttaaaggggaatcctagaatttgagaaattggaagaaactacagggatcatagaatcagatcaagtccctcattttataaacttgaaatactgtctttgtattttacatatttttatgatatattataatgtttcaacatcctaataaaaatctttctggcaagagagactgttcctcccaaccccaagccaattcttagcaatacagaggacttggctgaaagcaccactttgatgtgcaaactaacaaatccagagccataccttctctatcaggccattgcacatcaggaagcaatattcctctaccttaaccatcccagagccgggtatcaggtgcttagagaccacccctaaccctatatcccaaagtccaccgaaattgttcaaacttgtcaatacaaaattattcaccctgcactgctttgcctttcccatgataccccatgacccaagcgctccctttgttccggtctttagcctcctgacagtctcggtatctttcccatgtggccctgcatggtgtgctgtgcctcctgtctctaggacttgtgagtataataaactctgctttctcctgagcctctcctgtgtctcctcttggggccacatttgactgaccatctcataaaagaatacaaaactgtcttaccttgtaaaatgtgggatacagaccttaagctcttatgctaattacaggtggtttcagactagaatatgaaacttgaaacatctgcatatgaaataggcagagaagaagaactggccaaaataatctttacatatatattaatctactgactttgtttttaaaaatgtgtggattttgttggagcattttataattacttctggttctgtagattggtgtagaactcagggtggtattttctgcaaacatgcaaaagagacaagaaaccccacccaaaccctacaccctcatgctaccatcccaggcctagtactgtctgcaccaatgagacaaggtttttatggcaccccaggaaataaagtcacagaaggagaatggcagatgacctaagtgcatatgagaaggctctcttgataataataattttcaactttttctgatctctctaacggaggacagaagcaaatgtgtattcctagagaggttagggtgtagcccaaagtacactgcagaagtacagagtttcctgaaaacattgttattttaaaaatccatgcaaaacttgcactctgcttcataatttaccagtgattgttttaatatccaaatcaaactttccacaaaacaaaaatcacccatttctaggaaattccccaaattcgctaactataagtaatgtttatcctttagctctttggattatttcccccaagcacacatactccaatgtaataagcacagaaaaattgtgttataaacacacacaacacacacacacaacatacagcacaataatctgatgaaactgggatttctctgaattgtggaagcagaggtaggtccacgttagcacacatgttcgcatagaaggatcaacataagcattacactttattttgcaatgtttcatctttttctcctttaagagagagtccttcttcggtgtctcctagacactggtaaccctggagaagtgtgacaactctcaatattcactccataaaattgtgacttgcttttcccagaagaagtggctataagagcccaaaaatcttggcaaattagaaaatgaccctgagaatagacgcatcttaaagtcttatccgcatattgcaggaaatagaaggtgagcattaagataggttgatactttcctttttaaaaagaagggaaaataacattgaagaacttatcatgtgcaaagcactgcattagggcactttatattcaatacctcatttattctccattacaaacttatccctgtgtgtctgtgttgaatatattttccagatgaccacactgaacctgagctttaatcaacacggcaatttagtagcagaggcagggtttgacctccactcccccacacccccaaacctttatgtcttacaacaaagcctatgtatctattacactatgctcctctcttattcggccacaaagaccacatttgctatcactgggcaggtgaaatagtaatcttttgccctgcatcagattatttgctttcagaacaaacttccaaattcagctttgactagaaatcgttcgaagctgtctactgtgattatcttcttcatattatttggagaaatcaatttgtcattatctagtaacattgaagaaacacatactatatgaccagtaattccacttttgggtatgtactccagagaaatgcagacaaatattcaccaagatcccttcttaagaatgttgataatattactgtttgccacagctccaaactgaagacagcccaaaagtccattgacagtaggataggtaaataaatcatagtaatttgtacaactccattcaggaacactgtgcaagaataaaagttaattagacacacaacatgaattcatctttcaatccaaatgttaaacaaaaaaaaaagacataaaggaattcttacagcatgctttgtcctacataaagttcaaaaacttgcaaaactaaactaaatcattcaggaatgcttgcatatgtggttaaacaattttttaaaccaagggattaattaccattaaattaattaaaggagatattctgaaaggagagaaggtagtctaatggggcaaggcctcacaaagatggcttattacttgacttgggttgtgattatacaagtatttacttctgtaattattatgcacttttctatatgtgtgttttatttcaaatttgcgaaatgtttacaaaattaaacatttaaaaactaaaattcctgggaagttatttcattctaccgtatagtaaactctaatgtctcaattcctctgacctctcactttaattattcaggtgctgagaatgttaacattgcagatgagaataagataaacatgaggactaccaaataaagcagtttctgaaattatttgaactagaaaataaatatgcatgtaagattatatgtagattaaaccaacagaattcacatttatcaaatgccacatatgtgccatgacagaaacacactaatgcacacaggaatttatgagcaatataagcaatacatcagccttttcccttctctacacagggaaaaaatcagtactaaggtgattgtatgtgatgagtgcctacacacaaagacctccaagagataagttttcatctaaattttaaagaacaggtatgccttgccaaagaaagtaaaggggcattcatcatggagaagtatgtgacacagatccagcaggagttagtgtcagccaagattgagtatggaagattgacttggctggagtagagtagctatagtataaagtgatatttgcaatataaagagtgtcaaggagaatccagtgaggtgtgtgtgtgtgtgtgcatatgcgtgtgcatagagaacccttgaaaaattaagaggctggacatgatggctcatgcctgtaacccaaacattttgggaggctgaggaaggaggatcacttgaggttgggagttcaaaaccagcctgagcaacagagtggaccccatctctactaaaaattaaaaaaaaaaaaaaaaaagctgggcatagtggcgcacacctgcagtcccagctactcggaggctgaaatgggaggatcccttgagcccaggagtttgaggctgcagttagccaggatgacgccactgcacaccagcctaggagacacagcaagatcttatctcaaaaaaaaaaagaaaagaaaaaagtaagaataaaagaaagaaagaaaaattagtaagaaaaagacaaacatcttcaatcttaaaatacacaaagactggccgggcacagtggctcacacctgtaatcccagcactttgggaggcccaggcaggcagatcacctgacgttgggagttcgagaccagcctgaccaacatagagaaaccccatctctactaaaaatacaaaattagccaggagtggtggcacatgcctgtaatcccacctactctggaggctgaggcaggagaatcacttgaacccaggaggcggaggttgtggtgagctgaggtcgcaccattgcactccagcctgggcaacaagagcaaaactccgtcacaaaaaaaaaaaaaaaattacacaaagactggaatagatttttcacagaaaaggatttcaaaaagccaataagcatataaaaacatgtccacattaattagcaaaaaaaaataaaaaatgaagctaaactgagttcccaccatacactcatcaaattgactaaaatgaaaaaaatcaacaacgccatgtagtggcaaggacatggaacaaatggaactttctcactgccgagcaaggtgtcagagccccggcatcagaaagtggttgacccacaggaagaaataagaatttactgatgacagtgtagagttgaaaaggaaagttttattagatagacactgcagaagagtgcagcagggtgcctaagcaagagaggactgagtgcgtcacgatggatttttccttaggggtatttatggaccttaaacgggaccttcagggtaatttgaactatgttagctacataagtcatgataaatgattacatttgtagacattttggtgccttgacatcagcaagggttgcatattgagttttgacatgtatgcatttcagagatgtatagaaatcccagtcatttataaatcttggagaaagaaatctggtaccaggtgttggcttcagataataaggaagtgtaattacttctaaattactcagataaggagttttgcctctggattgtctgcttggtagccactaggtgatctttgctttcctcactcacttttctggtagtcctgtaaattggaataactttggaaaatgtttggtaatatctaccaaagctaaacatatgtcctatgaccctgcagtcctgctcctggatatatactcaacagaaattagttccatgcctatgaaagacttgcacaggaacgttgacagcaattttattcaaatagccaaaaactggaaatgacccaaattgttcatccacagtaaaaggagcaaataaatgatagtatagtcatacaatgaaatactgtagagcaacaaaaaagaacaagttactgattatataactatgtaaatgaatctcacaaataaaatgttaaatgaaagaagtcagactttacttaaagagtatatatttacatattatatacattcacaaaagaggatttcatttccatttatttgatgtttaaaaacaaaaacttgtctacagccgtagaagtcagaacagtagttagcttctgtgagagaaaaccttcccaggcgaaggcacaatgaatcattctgggcccctacacatgttctgtatctcgatctaagtggtagttacataggttcacacacgtgcaaaaatgtattgggctgtacacttaatatttataacttaccttagttatacctcaagaaaaataaatttaaagactgtagcaaccaaaataaaaagtatcaaaagaagcaaatgaaaaagtgcaggtctggcaaaagagggtaaataaattatttcttttcccataaagcattaatgcctccctttacatttttatgttggccatgtaattattaaaatcttataaaagaagattttaatcacatatatccccacttataactcaaccctaaaacatgaactgtttttatttattcatgttctcttgcatatccttttccattgatctgtatacaacattacataaggagtcattcgggacacaaattctatatagaagaaatcaggatttgcaatcagagaatctaatttgaatccttgctgggctatttattagttgtgtgatctcagccaaattacctaatctctctaaatcacagtttgctcacttataaaagggaagaaaaatgttctctacctcacagaattgttgtgagaattaagttagataatgtgtatttataagcactgctcaaatgattggtaatttacattaatattggtgatcccagtgtggatacaattcttcattctgctcttctcatttcctctataattagcatttccacaatagcacataatctacatagtggcctacctaatttccattccctcatttcaccaacaggaactcaattttatctgagattggcactgtgcctagcctagtgataaatcatgattgatctacaccaatgatggcaaatctgtttcctactttcccagccttccttgcagcagggcgtggggtcgtgtgactaaattctggcactgaaacctaaggggaaatgcactgtgggagaaaggggtgcttctgataaggcattcattttactggcaaaaggaacagaccatgctggccctccctttctcccacttctttcggtcttaaacccagatgcaccacttagaactgtgaaagccatcttgtgtatacaagagaaatgcttaagaatttcagagacatcagcccttgacgcacctgtggccacctacctctggacttcttgttatgtcagaaaaataaattcaagtttctagaagccattgttaaggtttctgttattgcagttgaaaacattccaaactaatataatggtttcaatgcctttggaaaagttcatcaacttcatataatgaaattagtcatttactttttgccagaaatgtacattgtttagttccacaaacatttacagatggtcttctatgtaccagttatctgggttactgaataaatatgacacattccttcccatgaaggaactaacagtgttttcaattttgctctattaaaaaaaaattccaagctgaaaatcatgatgcatacaatttcttcggagttatttacatgagaaaaaatactctcaccccatccacccactgtgctcccaatgattttctactggtttctggaacacaccaagctcatttcattttagtaaatcttcattagcagaatattttttctccagatcggtgtaaactggctgtttcctggcattgagatctcaaactaaatgcctcttcctcaaaatggtctttctcttcaatcacacaaatgcagtcatccatcatagcatcctttttaattctctgcagagtaattatgatgtcatgtttttcctgcttattgattcctttttttgttgtttcctccagtacctctaccccactgctaaaatataagcaacctgtaagaaatgagtgtgttttgactacatctgcaacccctacaacgggggtcagcaaaccacaagctgcagctaaatccagccagctgccagttttgtaaataaaatttcattcaaacatggctatgtgtactagttaccgtatcgtctatggctgcctttgtgctacaagaacagagtagaatagttacaacagagactagatgtcccacaaagtctaaagtagttgctatgtggtcttttacagaaaaagtttctggatcctagatctagaagaatgcctcacacaaaataagcacttaataaattcccaagaaacattaacattttgtctcaaaggctgttatttgtaggttttctcattctgtaggtatatttgtttctaatgatgctatcagtcctgtttcagtaggattgctctttactggaattgcttcattgacaggaattccacaccaaatttccagaaagaacaactcatcaccttggatcagaggattaaaggtttagcacaatattctgcaaatcacagggacatctcaaaggctgaatcaaatgtctttctcacatttagtttagcagcataaatcagatttcacttgcatttttttttttgtacatcatttcattcttaggctatattccatcatggacatacagccatatgattggttttggttggttggttaaacttttattttaggttcaggagtccatgtgcaggtgtcacaggatccttagggtgttgcttttccagccagaaacctttgtggctggtggcacctttgcccaaattttgcttgggcccgctgggcttgttccacccacttgacccagcaggccgtgctcagcttgtgctactggcccagatgtcatgcctgccaagggcaagccaggtgtggagcagtgaggggtgtgtgagtgagcatggggtccagccactgcacacagctaggcatgccagctgcagtggggcaggcagttccaggctccagcacaggccatggctttgtgtaaggcagtggctggaccaggcataccaatagcggattccactgtgagcaccagggaacacagtggcacccagaagatcagagttgccaggaactacagagccccaaagaaggtgtcacagccttggctcagggagcccctaggtctggcttccctaaagggctgcagctcttctctccttcccattgcccacaatgtgacaagcagggggcatgttctagccctatttgtgttacagcactttcagtcccaccattcagtgggtcctgagttcttgtcccctgtccaggaagaatgaggtaggcagacaactggagggtgagcaaggcagacaggggcttcatggagcaacacaacagttctcaggagacctggagtgggtggctcctttctgcagctggtagtacggacatctctgtgagtctggctgagtcctaggcttttatggactttggaagagggaaagtgcatgctgataggtccataggtggccatgggcaccggaaaaagcaccacagttctcacttcgggccacagactctatgtttaaggcccttcctggcttgaaggtcgggcttcatcagagacctgcccctttccacccagaaggttgtctttatcctgctaccatcaatcatgtcatcccttttctggcgcccaggctgtttgtgcagaggggtgcctgcaggcccacacccagccacccttagccccacctcagcttccctcccatgcttgtcagtgcccaaaatctggaggggtccaaggcagcaggggcttggtgggtcagcaccaccctgagcactcacacacttggctgggttgcaacagcacctgggcttgtcctcaactttgctcccaaatcggagcaggcatggcgagaggccaggcagcaggagcaggcactttctagcttgcaggggcagggaggcttcctgggtctcagggagtacagggatgcccgggtccacagccatggctaggaagcagcagctgtgcctgggagggtggggctgccaccccgtgaactcaggaaggcagtggggcttccccctgttcccagctcccactggctccatggaacatgctgttggcgtcttcacagtggccacttcagataggccgctgctaccgtcatgggtttattatataggtaaactcatgtaatggggatttgttgtactggtaatttcatcacccaggtaccaagactagtacccaatagttattagatcttcatttgtcaacccaaattacactaccgacaagtgaaatatctgaattttttatcacaattaaaattgtgttctaaataatatcaacatcttcatttgattttccaaaaaaaaaataggttgctctttaattcagattcttttcatgcattttttttaatcactgaaatgaaataaaactgctctgagcccaagttagggaaccagctcccatatccattagtcacttttttatttttgcttcttaggaatataacttctaataagttttgacattaaatattgaaagcttaattctcagaggactgatttcaaaaatacatttcccatatttttgcttgctgctgagaccttagagtgtgctactaggtgtatccagggcagttccagggacagtttatctttggcaggttgtgggtgtggatagggctggggggaagttgcttgcaaaacaagttgtattgtgagcacactaataagctcctcttccagccaccacagaacctccatgaaaacctctaggattatgggtagggtttcagagtctctcttttggggatctatcgcttatgtcccagaccaaatcaatctgttctgtttttcttttccccaaatctgcctcttcgacatctatttgatttatgcctcagccaagtcctttcagattaaggttttgtttagtgtccgatcttcactcctaagcattgtctctgtgtccactttatttctatgacctgtggccctcaggctagactcatcctatggccacattcagccaggttcccagattcttgttctgtgggatttcgttaagggagttacaacatccaaatcaatatgtagaaagctgatctagtctcaaagaatagagtttaatgtattgcagaagcttattgtcccctgtggtagaggaagtacagctcattctgcactctccagaaatgtgatgaaaacaaacagaaaaataaccaattactcgcttcaacccctgctctttaatatttcaagaattgtcatattaaacttcagactctcaaagtataaataaatcaagtagttggaaagaccactgtcttcaaatgactcaaattttttaattgatgctgcattatgcaatacatttgaaactataatctttggtgatgattccattcagcactttcataatttctatttggtatgttcatgtgtttctgtgtttccttcatatattctgcagacatttcaaataagtacttatttcaaatctctagacccaaacatttgggaataagttatcacttggcataatcttagattactgtgttatttcccaaagtagattactacatggctcactaatcctgtgagatgctctaagtttaagacagaaattctcttatcaaatactgttatatacttaggaaattctggattctataacactctcttcatcagcgcctgtgaactgcagtagtaaagaaatctgtttgtttacccgccatttcccaaaattatttagctataaactttattttaaatatttattaacattccatagatcacactgtgggaaaggagggtctatttcagctgagcaggttcaaatgctttcattgtccaggtatgtaaataaatgtggaaagcagtctggtataagacaagagggaatgatgagggacgtggaactagtgggggaactttgctctcctaaaggctttcaagtccaaagtactgaaaacaaatgatagattgagagagagagagagagaccaataaacaaatctgttactcaactgaagcacaactatggagaagattcagctcttaagccactagttttcaactcctagcctcaaccatccttcatgtaacaagtgagaatgagagtctcagaagaaataacttatccagtccaccctagaattgttgttctttttttatttcaaactgggtatgatttgggggcttatgtcattaccaagcacctgtcattgcattaggcactaattatgttattcgctcctattttatagataagaaaattatttcatctgcccaaggcaggcaaaacaaagctggagtctgatatcagatctctgtctgccaaagcctatgttcttctcattatgttatgcttccaatctggcatgacagggatgtggcacttcatgtgacaagagtaacacatatggcaagtaacagaatctttaacaattgtgttgggcctgacagagttgagtaaccatgcattttccaaaaggaatcaactcacattgagtaaccatacattttccaaaaggaatcaatgcacaggtcctaaaaaaaaaaatagcaacaattgtaatcatggtagaactaccattgttaaacacctacaatggactaagcccatattattaatgttatgttattcatattatctccatattatatattatgataatattattcatattatttcctgtcaacacaacacccttcaaaataggtattaaatacatttttgatgaaaaataaaactgactgtgagaaaggttaggtaaattttcaaagtgacagagctttaatagctggaatctgatcaccctgctttttcttatgacaaaactccctcttatgttgtaaacctaggctttggaataggaaagttattttttttattcctttagtaggacatgtctatattcaaaaccacttctttcattcaagtagtccctgacaatttaaatattgctttaacatacataatctcatttgattctactaatggttttttggtaaagaaggcagatttcaaaccccccacatttcagctgcagaatctgagactcagtgaagttgaaatgtgtgtagagcagagcttggacacaaacccaggctttctgattttcatcatcattcatgattcccaacacgctgcacagaggcatcttacttagttcacattttacatgtggacagaggcccagagaaattgcaagtcacaggtaaaagaaacagttgcaggtttacctatgactattacgtttgagaaaaagtcacccaatttcctagactctgacacatcatgtttaacaattattcttaatctaatgcaaaattttttatagcatttagccaccattgtactttctttggcctctatttcaaggcagtaaatatctaaattgttaccaacatgcacactgcaagaatagaatagatttgtaaacttttaaaatcccctgattattgatacacaggaaaacttggatacttggatgaatttcaagggcattaggctgagtagggaaaaaagccaatttcaaaaggttacacacgatatgatttcattgatgtaacgtgttcaaatgacagaattatagaactagaaaacagattagtgtgtgccaaggattagggatgcaagtggagagtgatggggaggggaggtagtaatagttgtgactacaaagggttagcatgaaggttttttggttttttgtttgtttgtttgttttgagacaggatcttgccctgttgcccaggctggagtgcagtggcacaatcatggcttcctgcagtctcacttcgacctcctggcctcaggtcatcctcccacctcagccacctgagtagctgagactacaggcacatgacaccatgcctggctaatttttgtattttttctagagactaaaactcctgggcccaaacaatcagcctgcttcagcctcccaaagtgctgagattacagacatgagccactatacccagcctgcatgaggaatttttgaggtgacagagcagtcttgtatcttggttgtgacggtggtaacgaaatctacatgtgacaaatttgcatagagctacacacacacatacacacacacacgagtgcacatgaactggtaaacactgaataagctctatgggttgtacttatgccaatttcctggttttgatattgtactatagttatgtaagaccttaccattgagagaaactgggtgaagcatacacaaaatttctctgtattacttttacaatttcctgtgaatctatagttatttcaaagattttaaaaatggtttacttttctgatcttaccagaggaccttgttgggttgtcagcatcttagattttaccagccataccttgggcaaatctgcctcctttcccaaaagccccctaccccacaggagaagtgcatgggctctcagggctgctgtcaaatgtatcccatatccaatctgattgcttttctttttcaaacacacccacaaattaaaattcaagctccttatttagtatgacatgctaataagaccatatgacatgcattcagaccataactggctccttatgggctgaatcctgcttacttttccaacctcattagatgctcctcctccccgtcccctcccacaaagtgagtactcttaggcttgtggttctggttatgctctcggttctttctggaatgcccttcttcatagtctttccaggggtacttagctgtgagtcctcagcagccctgcagtagtactgccagtagctgtgggtatgaatgtctccagagacttcttcccttcctccacaaattcagtattttttgagacagtgcagctctgcttccaatatgccatgcagctaaggagtagcacatgtcaagtcaatagctcaactcagcaacagtctcattgaagatgcctctcagcctctctccccaaatgaattctcaagcatttaccttggccaagtactaaatccactcaccatttttttacagctatccttctgtgagtccagaagtaaagcctaccctaaattattcccagaaggaaagcacgttggttttctctcccaccaatttaggtgtttactgcccactaacgtttcaaaatctataccagattagggcagtaataaagggtagcgctttgactgggatatggaaataatcagcaagactttgcctatgctggttacctctggaagtttgagaaaaaacagcttaatttgcatcacacagccacaggttttcatgagcatttattttagaagagaatataagatgatatggatgcaagttacctaatgtatgagcaaggagagcaaagaaagcccggtggcattctagaacccaggactgctaagccaatccagtcaaattggttgtttatcctgagaattttttttaccacctttcattcttcttttaattcctactttttcttccctggtgactaatgccaaggccaaatagtagcactcctgaaggagattcagtttaaacaaagttattttgagggattattgaagagacacatcagcataaaagagtggaaatatatttgtaaggctgattctcatcccacagagtacacatttttatctatcccctgagctgatttttaactaagaaggagattctgattaactttctctttaaaatctctcctcataactgcacaaagctagctggataaccaagcaatgcatatggataagataaagaattgtcaatccttttaaataatttagcagcatattaatctttgtgaacctttggagactgggtttaatgtcagctttactttggttctatggaaccacagagaattcgggacacatttctcacctcaggtaaagaactacagcagtggaacctctgaaaagtttaagtccggaagttaaactggaactcaaataatgtgaagtatttggaaactggccatacaagaacattctgtggaaatatggccttgttctgacactccattttttcacaacattttttcccaccaggtaagtaataatcccagagctttggccatgatgcccaatggaaaaggagaggatcagactattaaagcagaaggtacaatccagtggatagaatggttccttcccctcagccatccagccctattcagccagtcccagatagtcaagctgctcaaagagatatcaaagcaatgtagatgcctagaagttatctggtcaacttaatgatccaagttaaaaatgcattaatacagtactttacacagatcaaaatactagatattactgaatctgcttagaaacacaaatacatagagctttagtgatttcctaattcaataaagttttaaatattttgaactctaaatgccctaacttcataactgcaccccatgtaaaattcaatcactacctaattgggaaatgttacatccgctcattattgattacctaattaagcaccttcatcaaagaatattcctgaaaaaaggatttttaaatccttgcaaaacaatttaatttaattagtggctcaggtatacatctcttgggaatgggttcaaagtacaataaaccatgcttttcatgagagcagccctctactcgttgtcttcataaagaattggccacttccaggttcaactggtataaccttgtatatttgtatcttcaaatttatctgatggagaatattaataagaattaaagatttttttacaagtaagaactgatctacacccagcatggctgtaatacctcctttgggaaataggactggtccatctgataagctaggaattcctaaaaccttaaattgaaaggcgacaacctattcaaggcagtataaaaagaagtagaaggatgcatatgagccaaaatctattgaaaagagctgaaagtaaaagactacagaagcaattttttaaaagcaaaatccaaagtggcagcaataggaggagattttaaagaagaggtcaaaaatttgaagtcagaaggtcagatcagatgaagactacatcaagaagcagcaaagaagatccaaagagctaactgagaacgaacactcagatgtctgcgcgtccttttccacttggacaagtaggaagaacataaccagctggcataaggcatcagcagtaggccgcagaagcctttgatcacacagatggaaatagtgtatggggtcaatcacctcgaaataggtcatggactctaaatgattcttccaagcctttgtcaaatcacccctgtgaaaaatagatcacacaggatgggctcatggcatggttaatttagaacctaaccagtattttaaacatttaaaaggctatgttctaaaccctctactttaaaatttatattcagggtaacaatgcaaatcagtttccttaattttcctatcaaaatgttaactcttccacttatctgtctccatcacaagtatatgaatctccctgaacgaatagcacaggatagttgtactttcacttaatattatattctattcatctaatgtccaaattctcactgagacaactgatatttagagaaataggctaagagacttgataaatattcatttccctcaatcctctaagctctatccccgaatcaagtcaaatagccagaaaagctacgtgcaaggactattatattagttccctgtagaaatgcttttacggggcactttagtagtatgtcttcttattgagaagaccaaaaatttgtcatctcttgcaaaattgctattgaaaaaatgatctagtatgttatgcaatgtcctctatataaaacatatcataaacaaaatcagtgcaagaaaagtgttatgtcccgtggtaacaggtaaccaccctgttacctttattagaaaaatgacagcattgaagttttccaccatgatctcccaaaagctcaaaactaacatttttctcaccttctctgttatttattttgtattcttctactcttgtcttattggaagcccccttgaagtcatttgtggaaagaggacgtatgcagattaatagatattacaattaaatgtccagtatgtggaaggatcattataaagtggaatgataattacagcttcacaactgatttgattttttcatgaatgtatatgacccatggttcgatccatctattaatttatggtatttaggaaagttcactgtggcagaaacaacactatgcatttatcatcctctatttcattttcctgtccttggacatccaaaaagagtacacttcctgcccaacctgcaattaaattggcactatatctgtaggttctggccaataaaatttagatgcaacaaatgtatgtcactgtaatcatgacacttaaaagcattccacattatcttcttgcattatcttctctgcttctgcaaccctagaagctgtaataagagcaacatcataaggtagaaaggtagagcagccttcatcagcctgggtccctgagcaactatgtgaagtagaggtcctctgcatatccacgctgaattggcagcataattgttaaataaatctttatcctgtaatgagccctgagatttcagagttaattttgttaccacacacagcgacttctctactgacaagtccctggggattatttgattcaaggaaacctttgtaaaacttcccactctttacttgactttgcaggcccaaatacctttctgatccattatcccagtgagctggactggaaaacacacaaaattcaatacctcctccttacatggtctttttaaaactgtagtaaaatatacgtaagatagaatttaccatcttaaccatttttaagtgtagagtttagtagtggtaagtgcattcatattgctatgcaaccatatccaccattcatctctacaaccctcttaatcttgcaaaatgaaaactttgctcattaaacaataactccccattccctccctcctcagcccccggaatgcatcattttgccttctgtctgtatgaatttgactactctaagtacctcatataaatggaatcatatagtatttatcttttggtaactgacttatttcacttagcatattgtccatccaagttgtagcatatgtcagaattaccttcctttttaaggtataataatattccattgtatatacacatatataaatcacatctttttatccactcatccattgatggacacttgggttgtttctacttcttgactattttgaataatgcttctatgaacatggtatgcagtaatctccccttattccttggtttcagttaagttcagtttttttttcccatggcttacttttattttttattataaaaaacacatacaagagttttaagaaatgatgaatataagacaaatcaaaaccacggtgagttagcaaacccattttctatatacaaatatagataaaccgttatactaaaatatactaaatacagataaacaaatatactaaaactctgaaaatggaatatcatcaaatgtgagacacatcatagcatggtctgtatgtacaaagcacacaaagctctgcctatggtcatctgtgaattgctcatttacatgtcactgataacaaaaacctgcaagggaacttttacccttcagttcttgtcttcctgatggttcactatggtccaaaaatattaaatggaaaactacagaaataaacaattcataagctgtgtgtgtgtgtgtgtgtgtgtgtgtgtgtgtgtgtgtgtgtattttgagacaggatctcactctgccacccaggctgaaatgcagtggcataatcacgactcactgcaaccttgaccttctgggctcagatgttcctcctgcctcagcctcctgagtagctgtactacaggtgtgtgccaccgtgtctggcttattttttcatttttgtagagacaggatctccctatattgctcaagctggtctcaaattccagggctcaaggactttcccacctcagcctcctaaagtgtttacaggcatatctcaatcaacacttgaaagttaaccaatttaaacagaaaatagcaaaaatgggcttttgctgctgaaatgtgtgatatattaaatagcatgatgaatgatacatatggaactctgggaaatttaaagagtttaagatacgtggatttgctacaatactttggagatatgtcttgcaagagacatacgaatctgaacagacttctgactttttccactgcggatggcttctgtggcttgatccctaaatggtcccttcagtggagccttattgagaggacttctatttgactgatgccaactgcaagatgaacaaaatcctacctctgaaacaatgtcatgcctgcatccttcaggatgatggtcagaatacacaaaagtgcagtaagcggagactatagagtttacagagcaggttgtataagttgttttgagcctcctccattaggaaattttctaagaaaggcatacctgtgtatcagaactgaccctaagattcgctttcttgaaaacccagcagtgaggttgtaggaagtaaataattgttactaaattcctctggatgcttccttaaggacttaatcattgggcatgaccaaatcagcagaatggaataacaaaatgccagaaaaaaaaatttagtattataattcttttttttcttgtacagaaagtttccagattgcagagtaagcaccaagatgataacacttctataagaataaaaagttctaggaggttatacagcaactgaaaggtcatataggcatatgggtatgctatatatgtttacccattccagatggcgagatgactgaatcttctaatttcctccaggattggcttttacaaagttttcagcaacttcagaaggtgtgggtcttcagaggcacttccttgtatgtacacgtgggaaaccacaggagacgaagccaggtaatggagcagaagctggcagtaaggaagtctttctttctgatagacagatacatattctgaacaagtcaatccataaatggatatataggaatctctagccaaaactcaattgggcagacatatataaccttctttggttttctgtggctgaattaaaattctattttcagtcataattcaaccaggtgataaaacttaatttcagttatttcagagttatttctttactcaagtggtggcaagttctaggaaaatttcatagtatatggaaccttggcaaggtggagtaggataagatgtatatatgttgcatctgattgcatcagatcctaagacaaagattcaagtgcacgtagtttgtttggaggtgatcccaggaaatattggcaggggaatggaaagtgatctatggaagggaagaccaggcaactgttaggggtaatgagcttcatcctgccggggaattctgagagttgatgtagaacacactcctttgagttatcccctcctgaatgcatgacagcttgggtatttgtcatcagctcccattaatctactggttgatgggtggctgctggggatgtgagtggcactaattctccagcactgctggcctgcctggcacagaagcagaacaggctgtagctcccaaggaaagccctctagcagttgaaagtcaggctgtaatgatgacctgcactgcaatgataatgtattaacaactgctatactaagtctcaatgtcactatctcttccttgctgcctcccctaagagttcctcactgtcttctggtccttggtcatccatctactggcttactctaagtggcttctcattctccaccaagtctcttaggatccagctttccttcatctactttggtacttttcaccatgcaacgaaatcatccagctagccccacctcatgcagagctgcaggaaatccatgagacttacggagcctcaactacctctgtgcccatggaatataggattgctctgttgctccagtaccaggctgggtggtagaaactccgtgtgctctctaaagccccatctacccaggctcactgtcatttcctctctgaggttttgccacctctcttgacattctattctgaaaagagcatacagaatctttagacatgctgttatagtaggtagctaggcagacatgagcagggcaggagagtccccaccaccactaccgggaatgtcagctgactatcaggtgatggtcaggtggttggtaaactgtctctccaaagtaataattggttgcagccagcagtctcccaatagatagaaaaacctgaaaccagtgatcagcttcccgataagatgtcaggagctgggtgagtgggctcaagcatgtgcattaagagggaaagtggcagagtttaactggtatataaccttgcaggaacactcgactggtaagggaagaacacctcaagtgagcatgtgcacaactccagtaaacacactgcacatgcgacccctcccaggcactcacaggccactgcacatgcagacagcccaccccaagggaagaatcaagggggaagggatgcaaccccccatgaagcatgccaacgtataaaaccgcaagtcaaagttcaaacagtgcacctgatctcaccagttgcccagttggtcctcttccaaatatacttcctttcatccctgccctaaaactttttaataaactttcactcctgcgctaaaatttgcctcagtctctcctgccttatgcccctcagttgaattctttttttctgtggagacaagaattgtggttgcttcaaatccttacggattagttgccattaacataatttggtgccacgtagctcagatacatttggctgctaacaacacctgttacttttttattgccctctttatcccaaattagcctgaggagctaggtcaaggtggacacacccctcgctcctgctttttaggaacctgtaatatctaagctacatcacattgtttctccttagacttgtttccacctcccaatgtgtggaatcccacgtagtctcctgacttgattcctggctctggctcatgttgtattcttccagctctatcatttattccctaagtattcttgaaggctaggttgttcttttgaaaaaaattccaaacttggttttttgtttgttggtttgtttggctttctttttcattccccttaacttaaggcagtgaatgccacagagctagattccaatgaggaacaggaaataccaaaaaaaaaaaaaattttttttaaaaagcaacttttagtaattattccaaaatatcatgaagccatgactgtcaaccctgctgattgctcttagcttatcgagaattttattcatttgttaagaagtgagcttctgcagacgtcttcaatttggggaaaataaatttctttatctgactgatttcgagagctgtaaaagtatttacttaagtaaatattgctataatttcacaagttcttttttcccatccatgaagttaccaatgcattatttctgtcactaaaaatgagaagaattaaccttgctacactctctggatttactgattgaggccttagtgtctgtcccttatgtttctggatttgcaaatgagacagggctgagcgttatctcacaactcatgcaaattagatgccaggaaggctattgaaaagggaagatggtatcatctgtcttgcaagggcattgctcagaatgacagccccaaatttaacctcctcttttccttcaaataaattgatatctcaactcagcctccctaacaagtcatctgcttcattgaaatgaaattccagccacactgaggagagccactagacagaatatgtcacttgctgcctttgttttcttaggctagaaaggtccataacctgaaggatggattgcattgaagaatgtttaaggaaaacttttgacgtgactgaggaaagggtgaggggtggcaaggaaggacgcttccctgatttttagatgctccacattgatgggctttagtcaatggcatacctgctgggtcctgccatcattcctgcatttcctatgatacctacaaaagaatttatactttgatgctgtcaaacttattcaccacctaatacattatgacagtccaggcttaagataaattcaaattcaatccatggcacaaaaatataagcacctaagcaataataggcatcatttgtttcggattactcaggtaaaccaatcgttggggtcaaactcctcaatcaagaggtgcacatatgtttatgacaggaatacaagtggaaagcgtgcctaagaaactaatcatttattcaacaaatatttatttatgttccagggactattctagtgcttgagatacagttgcaagccaaacgacaaggtcaccatgcttgagagtttatatgttactggggagacagacagaatataccagaaaatcaaatactgtaagaaactagctgatttcagattgacttaagtagcatgatggaaactaaacagggtgaggtgataggagcaatcagtggagtagtttcactttgaatagggtgggcagggaagaactctctgaagaggtgatgtctgagatgagacatgaacaataagaaggagacagatgtaaaacaaagtgcgttcaacagtaaaaacctgaaggtatgaaagatcttggggatggtccacgactttagagccctgtgtggctggagactagtgaccaagtccaagggacagactgggccaggaccattggaattggtgggaagactttgaagtgttttcaagtaaaaaacatgccatctaagtttttatatcaaactgggtgacagcagagaaagagtgaggcagagacactggttagctggcaacagtgtaacccaggtaggtgagtaatggaagggaagacagactagggtgtttggcaaaaacttaaccacatctgttttgaatccaaaaaaatatagttaattagttaattcttcgttttatttatttatttatttatttattgagacagggtctcactctggcaaccaggctggagtgccgtggagccactgtggctcactgcagcctcaacctccggggctcaggtgattctcccacctcagcctccggagtagctgggactataggagtgcacgccaccatgcctggctaatttttctgtttttcatttttttgtagaggtagtatttcactatgttggtctcaaactcctgggctcaagcattctgcccacctcagcctcccaaagtgctgggattacaggcgtaagccactgcacccggccagttaattctttattctataactaatggatgctgaaagaaagagagagtaaactactttctcctcacttcagaaaattttggagagaatctattagggagaaaaaagaaaagaagtaaaagtggagggcagatccatcgatggtgtcattggcaacataaagaaaagcatgtgtaagttttaggaatcaacatcaccttcaacatttcatgattccatccactttttccaagaagggagatcaaaggttaccatgcaagtgctaaaaagcaaattcagataaaaagaatttggcagtaaaactgtctttacaggagatgaaaaaaaaaactctcagaagagaaagcctaccactaaggacagggagaaaaacatagtcatatttagttttattgggacccaccctcggcttgattaattggataatcaaaatttctatttagtttcaattgcttatcagatcaaagtaaagccattcatgaatagcacaccatctgtataagcaaaatttccacagcatcttctctcagtgcaggagtctttaagtttattaataatatcattacagtgcagattctttgttttaagtttattaataatatcattacaatgactagtgattaccttgtgacagttttaagataccttatatgtattgttttacttaatcttcacaaaaacctatggagtagatcctgttaccctcattttacagatgaggaaactaagacaaaaggtgtcaaacaaattgcccaaaatcacatggctagcaagtggcagagccagaattagaagccacattgaccatcaagctttgactcaaaaccactgacgttcttgacattcaccacaggtgaatcaagaaattctgtagaaactcaccttgaagtacatacacacacacacacacacacacacagagagagagagacagacagacagacagagacagagaaagaaagagagagaaaaggagaaagaaatttatttttaaaaactggatcacacaattatggaggctagtaagtccaaaatctgcagagtggaccagcaaactagagagacccgggaagaactgatgccgcagttcaaatccaaaggctgtcagattggaggcccaggaaggaccagtgttgcagttaaagtccaaagaccatccacgggcagaatctcttcttacttgagagaggccagtcttttattctattcataccttcaactgattggatgacacctacccacaggatggtaggcaatccgttttactcaaagtccaccaagttacacgtaaatatcatcaaaaaacaccctcataaaaacatccagaataatgttcagccatatatctggggaccatgggtcagcaggttgacatataaaattaatgatcacacttacttttgcaaaagaaggaaactatctgtggcctctcaacctctcaactttttcatgttgattcttccctgggaatgtccctctcttctttgggatgcggtacaacacagactaatgattaaatgcatgagttttggtttcaacctggtttttgagtctgagctctgctactatttttgtaacctcaggaaggtcacattcaccctctacccaaaggttcctcatttgtagaataggactgaaatatctccaacccctagggttgcaacaaagtaatagaagtagagctcttggctcactggcacatgaaaggtctacacaatgttcagtaatagcagaagtcctccagccttgcccaggtcatggtgaaggcaaaattttcattatgtagaacagaaaaaaaaaaaaaccataaaaaatcaaaattataaaatagtccttaaattcccaaagccagactcatactaggatatttttctacctcttcagactcaccatgatgattcttttctttgcattgctttgcaaataattgcatctgcacagtttaacacgtatttctattctttaaatcagtgtattccttagaactacaggatattaataggtgtcacccaggcaaataaaggtgtccttgtcacatgagattagggatttacaaaggctactttatcacgagatttctcagagtgtttatgtgcatatgtacattgaaatatctgaaaggaagatataatatgcaaagtttcacatttaattgactacaaacccttctgaagtggcacttccacaaggagtgttatgcagaacactctggcaaacagtgctgtaattgttacaaatgtgttagacttgccttccaagttaaacgataaagtccccaagagtagagaaataatcgcctctttcatattcccatagcacctgcacagtgtgaaaatagagcagctcagtaaatatgtgtcaattgataaaattattaaaattattttaattccttaatcagcaaatattttctatgtttggagtgcctgctatgtttcagatattaccctaggtactaggaaaaccaaaattaattaaatatagccttttccctcaagaaacacacagttcaataaagagtaagtatgtaaataattgcaatattgttcattgacaatatgtttacatattgtatatatggatatacatatatgtatgtatatatggatatatatatacatgttagtaaggtcttggggtgacacaaaaaaggatataatatgttcatagccagggcacaaagtggagagggagggttggagaagccttcgtttagaaggtggctatctgaatctgtttttatgctgttaaaacaagatatcatagcctgggtaatttataaaaaaatagacacttatttctgatggttctggaagctgagggtccaagattaaggcattggcatgactggggtctggtgagggctactctttgcttctaagatggcaccttgtggcatcctccagaagggaggaatgctgtgtcctcacatggcagaagggatggaaaggcaagagtactcccttcaacctcagacccttttgtaagggtgctaatcccattcatgaaggtagagctctcatgtcttaatcacctcccaaaggccacacctctttatactgttggattgaggttagatttcaagatgaattttggtggggacatcgtcattcaaatcatagcagtaaccattgaactaaagcttgagcattgagaaggaattgtccaggcaggcaaaagggtacaaggacattctaagaagtccaaaaccacagacataaaaataacatggctgaatcatgagaattctgtgtgccttgtgcatacaatgcatatggtgctgcaaagggaaatggagatggggagatagaacacctggtatttggaataccatgttagaaagttttaactgttcttgaggtgatgagaagccaatggcagatttggggtcggtctttcaaagtgtcaaagaagttattattaaaaaggaaaaagtggaacctaggaactacatgcttcctgcactattgccaattcaaggacactggtgacaatagctcaacatgatctctgtgtttcttcctaatctgatttcctaattgagacaaattcctataatcttagtttgattatacaaaatatcagtatgattgtcatttccccattctaggtatcctcttttggaataatagtgtcctatggtataagaaattgttcattaatattttgactatttaaaaaagattaagtgaaagcctttggaaacttgtgaatgataatattattacaaacagatctcatttggaaaccccatgatatctgaagaagagaattatgtcagcagcatccttgaagatatttcagttttattgttttttaaaattattccttaatagaccatcccggctaaaaacggtgaaaccccgtctctactaaaaatacaaaaaattagccgggcgtagtggcgggcgcctgtagtcccagctacttgggaggctgaggcaggagaatggcgtgaacccgggaggcggagcttgcagtgagccgagatcccgccactgcactccagcctgggcgacagagcgagactctgtctcaaaaaaaaaaaaaaaaattattccttaatttgagagtatataaagaagatactttggaagcatgctctgcaatataagaaagggattatgattctagcttgcaacaccagcaattaatgaaattgttctttgcggagagctcaatgtatgcttttaaatatgttaaaaattatacgtgattcttcaagtattcttttagaacaaacctcagagttaagccattcacttgatattgtaacttgagataagtctctgggacttgagatgatgcctctacttcttccctccctcctccaagccccatcaattattagtcctcccaacattgcatcacttggtcaccacaagtgcaatgagtgactgaaagctgctggatgcatttcacagagaacgtttaattccctgaacaatagaatagaaagtaaagaaagtcatcctatgccagattcaaaaagaccaactattcatcacgttttatgatgcccatgacagcagctgcctttcaccgctgcagtgcaggatgaggggaaatatgctcctgagaatgacaggaggagatgagagaggtatttactctaggaaagccttctaaatgaaataaccaaaccaaacaggaaaacaataaaactcaaaatgacctggttgttcccaggaaaggcaagcaaataaaggacaaagcctccagtgaatcccaagggctctggtttgagaacataatgagggacaagcctgtaggcaagtagagaaggttgctgctacccttgaaagagtccaagacatgcctggtgtcaccctgggcctcagagggaggtagtgcttggtgggccacaggaatccaaggctaacctcagctccatgaattaaagcattcatatttatcaacccaaggtaatcaggttcagagcttctagcactgcttaaccattttaagacttaggtttaaaaagcaatatgtcatttaagcgacacaccttcttgtgctagaggtcttgtagaggcttcactgagactccaagacctaaattctagtttgataccatcatcaaatctcaccctgtgcacagtataggtgttgctgagataacatgacatatgcatttctgaataacctcaagttttacaaaacgttacttaacaacaacaaggcttatgtggagtatggagttagggcaacccacttaatgcctatggaaatttgtaactggggaactattgataacaataattggaatcttgggagatacttggacaatccaaataggcagctcagaggggctggagaatgccccaggtaatactaaactgccctccatcccatgagtagaaatccatctagtaggtgtgagacaatgctggtagaactagaatcatgcacacaggaggaagtgcaacctgccaaaggctagggaagtcccacgctggggagaaacacctgggtacagatgcttgtgttttttctccttttcttttcttttctttctttttgagaaggactcttgctctgtcacccaggctggagtgcaatggcgtgatctcggctcactgcaacctccgcctccggagttcaagccaatctcctgcctcagcctcctgagtagctgggattacaggcgcccgccaacacacccggctaattttttgtatttttagtagagacagggtttcaccgtgttagccaggacggtctcaatctcctgacctcatgatccgcccccctcggcctccaattgtgtttcattttcttcatatagggtgataaaaccttctgctcgtgtttcaggcagcggagggttttcttctttcctactgaaggttatagttctttcaccattctggtattcatgttacagagaattgtgttgcagagaagaactccccaactttgtgttcctgatctctcctctaatccagttacatccctgagtggagcacagtgtggagatctgggtatatcactgaaccacaagacacaaacagtgatcctaaaatgcactgacatttcccttttcgaatagctagtagcagggtgatagcccaacttctggggaaccagcctgaaggtggatgtgggcagatgtggatgtagctccacggaggggttttataacttcagaatgtctcctgcaaagcaagtacaggctgtccaagtacagtgaacttttctacacctttggctttactgagaatgagggtggcacagtgggtcgtaaggtaagataaggatatagtgtcatggaagcctggagaaaaaagtgtgaaaagaaacactaccaacactacccaggcgcggtggctcacgcctgtaatcccagcactttgggaggccaaggtgggcagaccacctgaggtcgggagttcgagaccagcctgaccaacatggagaaaccctgtctctactaaaaatacaaaattagccaggcgtggtggcacgtgcctgtaatcccagctacttgagaggctgaggcaggagaatcgcttaaacctggggggcagaggttgtggtgagccaagatcaggccattgcacaccattctgggcaacaagagcaaaactccgtctcaaaaaaaaaagaaacaccaactgtctttaatgttgttgaaaggtcaagtaacaggaaatccctggatctggcaacatgaaaaacattgttttactaatcaaaagcagccactgtggaaggatggagacagcctgagtggaatgaactgggaggagaatgttgtgaggacatgcagagactttagaccggggatctgtaaagggccagatagtaaacattttagactttgcaagccttgcagtctctctcacaactacccagctctgctgtgtgaaagcagccaacgtctacaactggcctttgaaccatggagaggttaggagtactgatcccctgggcagtcaaaaatctgcctataacttgtgactcccccaaaacttaactactaaaagcctactattgactggaaacattaccagtaatatagtcaattaacatgcatttcatatgttatatgtattatatactgtattcttacaataaagtgagctagagaaaagaaaatgtttattaagaaaatcataaggaaaggaaaatatattttcaattcattaaagtgtaagtggatcatcctaaaggtcatcatactcactgtcttcacattgagtaggctgaagaggaggagggggttagtcttgctgtctctctcaggcattgcagaggtggaggaggttaaaggggaagcaggagagatttattgtaaaaaatccacatatacgtgggcccgttcagttagtccaaactcatgttgttcaagggccaactgtatatatttaatataagaaaaaggggatatctgcgttccaataacactttatttatggacaataaaatttgaatttcatataattttcacgtaacaaaatattttttaaaatttctccccagcaaatgtaaaaaccattcttaatccttgggttgtacaaaaataggtagtaagccaagttcggattgtgggccatagtatgccaacccctgcaatagaaccctctctggaaaaggttttctgtgcatggtagtgaatagacagcatgaaatctgtagatcagggcagggcgcggtggctcatgcctgtaatccagcactttgggaggccgaggcaggtggatcacctgaggtcaggagttcgagaccagcctgaccaacatggagaaaccccatctctactaaaaatacaaaattagccgggcatggcggcgagcacctataatcccagctactcgggaggctgaagcaggagaatcgcttgaacccaggaggcggaggttgcggtgagccatgatcgcgccattgcactccagcctgggcaacaagagtgaaactctgtctcaaaacaaacaaaaaaacaaaaaacaaaaaacgaaatctgtagatcaaaagggaatgcaagttccttaaggaagaaatattttctgtcttattttctagtttagataattctctaacacaggtcttagcatataataagtccttaataaatacgtgctaagtaaatgaattaattttaatgtagatctgactgctaaatcagtccactatgttccactcgattccactgccacacaggcccacagacaggccgaagtagagcctacatgagttctcagcagctaatataataataacccgtctgtgtgccatgagtccgtcactgcttccggaacaggagacagatagctatctgcaaaactgggtgtctgcttacttggccttgctctgaatccccagtgcagacatctggctgtgcactcagacctgaaccctgcaaactcacctgagattatgtgccctattctttgaaaacagccctgattgagtaaaattccccagctcaattctaatgtcaattttcttttcgtgaagaattcttttccttaacaaaatgttaaggcccagccaagaagaaaatacacacacatgcacacacacacacacacgcatacacacacacacccctatatataatatgcatatacatacataatacatacacatatatgtacacatacacacacactttttttgttttgttttgctctgtcatttcccctgctccctttagaagcctgctatcttctcacaaacagcttctgagctgccttaactgataagcctatgaatgggtaagctctttcagacttctccaggatctctggcagctatgctggctgagggaacagataaccctgggtttgaggaatgacagaaggtttcttgatccactagctgacttactaagcactcttctacatagagatccagggtctgtgttttcaaagatctcatgagaaacagagcccgggaaaggcattgtcagcatagaatttcctccacaaaatgattcaaggaacaaatgctcatgcaacttttttcctcctctgaactcacatcacggacagtgtaagctgcttggaactgaatcacacactgagctgtggaattaaagccctccgcccatcttctcagtcttatcattcctggcacagactgtttcatctcccacagcctacatttgagttacactgaattttctgccattttggaacaacccattttccttcatttcattcatttgctaatttttcagcctattgcctacccctctcctgacctcttctctccaaccttcatctctttctctcagagtcctactcatcctcaaggctttaccagcattttctttcctccaagaagagttcgtatatacccatggaagcacttacatttccaggtcctactattcatttgactttgtttcctcctccactgcaatatctgctggatgtagtgggtttcaacggagagagtatgtgctctagatttagacagacctggttcaaatcttatctctgccacttactcacaaagggttcttggtgaagtcagttaacctctttgatctgtttactaatagataaaatacctaaatgtttccaagtttgcttgagcagcaaatgagataatgagtgaaaagcacctggcacaggtgatttttttaaaaaatgacagttagtatttgcctccttcaccccactccattctgtaaagatgactttatcttcacaacctccatatttgctcctacccaagcattttccataagagatctggtctattttttcaagaggaaagtgattagcccaagctcctacaacaaactgctcaagttaaacaaaaacagaatcagaaagttatagagtagaaagaattctaagaaggaatctggtagaattaggaattttcaaacaactcaatatctgccatctgataatcacaggtgtctttctgcatatggacccaacctaatggaatcattgaccaatatctggtgttaacattccaagcccacaaaacagctttggcaaaaggtcctactctctaatccatctcccttcaatgggctgactttgccataatcatgacaacactctcttggtttctaagtaaaaaggaattcttggaagaaataattaaaaaggtattcacctcaagtgacgtccttatgtttttacattaccaagtctttgatattcctgatctcatctttaattctctcatggctttaaacatctcatttcaagatcgtgatatgggaataagcacagattcttcctttttacaaatgggaaattgaaagtcataatggtgaaaacagtgtgttgccactgattccttcacaatggcctagaaaatatagaagtcccttactggctggccagttgagttcctggtcaaatggcaggctcaagtttggcctgtggccatctcactcacagagcaggtctggcctccattagattgatctagaataacactagaaatgaagtgcttagagtgggatattttcaatttgcagtgaaagagaaataagggcaggcagagcaaggcaggagttgacagccccacatgttaaaaaaatgctctcaacaaaggagatttgcccaagaatatcacattgaaaaatcgaatttcctcaggcaaagcaaactgtatgccagtaaaggtcagttattcctcctagatcacagttattgcaaccaactatttgttttaaagtgagtttcgtattgtttgtgtttacagatcctagtctgtcttatgtagggagactactaaagaaaaagaaataagcagaaatatcatttttctattccatgcctgggaatattaaatggtacttggctatttaaatatgctgtttggactgaattcaaagtgcattatcccatataccagttgatgttgaaacacttaaccaaatgcttaatgcctagaaaaactgtgttggaccttaacagcagtggtttaaaaataggtaatgtcagaattttttcactagctcttgagttaactcttggtcatccagcatgtgaatcaagactaaaattgtccctgagttgtagaggaatcaccgaatggtgggggagaaatgccgcttaggttgtttttctgaagagtttagatcttttaataaagtaacaaaaggctaagggacaacccacaagttgggatgaccgagataactaaagagcactccttggtggaacccctaaaatgacaaataaccctcatctccaggagtgctatggttgctgggctaggaatatccagggaactggtatattctaggaataatcctttccagttagaagccaacaaaccaatgggcttctacaggacacaaaccgaggttggatgctgtcagactcttggtaataagccaggttaataactatagtatcatacattcaccatgtcagattctaaaatagcagctttacatacctcttaccatttaaccctcataacacttctgcaaggtaggaattatttcctatattttacagagatggaggctcagaagggtaaataaactgacctgaagtgacatgcttgttaagtggcaaaggtggttgagatttgaaatgcctttgtaaagtggttaagcccaagtacgcatcaccatatagccctgacccacaggaggtcagagacagtggagttaaagacactgggaggggtcaaggaggtcaaaatcaagagtgaaatccacccaattatcatttggcctttcatgcaacagcaggaagttaaaaggtggaatctgaccatttgcattgatttttccatgcttcctcatgctcctttccctggatccacattccctggtttacagtacatgtttttgcctcccctggctggtccagtgacccttctaaatcccctcatctggaatgttaatctccaccctgcaagttctcttggtctcagtgtatctggcagttcatataagacatatccactccaccaaccctagttggaaactttagcctacagagtagcctccaatttctctgacttcctttgacctgctgccccttagcttcatccctccagccaccggtacaaggttaagacacatgcaggaggtcacagcattcctaaacactgtaaaactgtaggttaggcaaaaattttaattctaatgagacattctaatgacaaggaactcacaaacccctcagctctttttctttggttctgaaagaggccatgactcagcctggtcaaatacccatccagattctatctgttaagtgacagctaaaaagagcaaggacccttttcagatattcagacttaagtggaaatttacactgctggcctccagcccattgctgataaaacgttttctctcagccagaaaattctggcaactcctccttctcaggttctatttgtagattcagcggatgcaccaatacctttcctcttcgcagggccaacctgtcagttacctaactccctctggttttccttggattccacactttgcctagcaagtgcttaattgctgctttaatgccagtttaattctctctccattattccctgaactccgacagccccattgcgtttctcccctttaatgtttaatgcgatgatgactattgctgatcaggactaaattttaccctaggatgcccagggaataaatgtttttattaagagtacaagagagggaaagccattctgaaaaatagaaaagattcccgtgatgttcctctggagactcattgagcagagagcagagctgacttgtggttattatttgatcagcttgagctaatctgtgttgatgcctcctgccaagtcctaccatttgcgtgtgatttcccatctactaatacataatgtatagatccggatataggcaaatcaattatcctgctcctaagaagcaaagacaaactaatggaaacattagcctaagacttcaggaaaattgcagaattgaatacctaggtgtgtgtgttttataagtgtatgtgtttgtggggagtgagccgtcaaagaggagggaggcaaggaaaggggttcagaaaacaaagaggggaaatgagaggcaaaatcacatcacctgaggccacaatgatctgcctgttttgtatggaagacatctgatcataacaacaaaaattattgtaaaacaacacccagatgattccaggaatcttggctttcttctgttaaattatcagatgcaacaagatatgtatttagctctattgagccaaactaaggatcagcatgaacatacactggagaaatgatgagtaacagggtgtcctagggaagattgtctctgccatgcttgaattcttcagttcacaagaaattcgaaaattgatggcacagacacaatgtcttaatatccatggggggttagaggatgttaaattgaaatgggttgggggtactcttgaaagctggctgaagggtaattgcatgcgtgtaaagctagtttaaatccatcactctccaaagattgatttttaaaactttaaaaacacatattgtgcccttgcagttatttgcacataaaaatgttactggatgggttacttttcagaaaatacagactttctaggtgaacttaatccataattttctgatttaagacacttgtgagaagcaagtttgcatattattaagaattcctaggactgaattcatatggtgagctagcatacagtaggtacttaagaaatgtttaaatggaaaaatagatgagtgaatgaatgaaaggtataatatgcattcagctacagcattctatatgcatgtgagtgtaggcagataatactttaaaatattttaaaattataagaacatttttacaaacatattttaaatgtttatgaccattttccagtatttggtagtgaatttacctgtctctgaataaagcagaaaccagatgagagccctatatttgcgagtggaatacagaaatgactttgtgaacttttcttttgggaagtcgtaacccttccagctgatatgagactcaactataacacatcattaagaaaatgcaagtgaagcagacatcaacagatgcaataggatctgtgatacatagaatggaatttggacaggtagggaaaattctagatggttcaaaggatatagaaaaacatatttgctctaaaacaaatactgcattttgatggtggcctgtagtgctcaacatcttaaatttttgtaagacagaatactgcaatgatgtgaatgcaaacatggaaatacatttttttgcttccactacaaacagctccgatgtattgaattccctgtgctatgcactttgtgtgactcattaaacactcaaaacaacctgaagctgagtgtcaccatctccgtattataaatgagaaaattgatgcacaaaaggtaaacgagttgtccaaggtagcatagccattgtgtgacagagttgggatttgaacccaagtctgatgtcaaactcagcttttgatctccatgaatactgccctttgtttctagaagaacacatgaatacagaaagttaatgttttgttagtttgcactaatccagacatcattttagtaacacaccttcagatctccagtgtctgtgtgaaggtcctgtaagggatactggggatatgaaggcaaataaagcatagttcctgtcctcaagaaactcataatccaaaacaagaaatagatattggcaccatgaaatgtagcacagaggcccagtggctgtcctggtgatacaactgaatgaggaagtaactgcctatgtagagaagaaatccaaatgaatttttttcactaaagaaccatgaatattcttaactgacataatcaatattaagtactaaggcaaacacaaacttgcccaatgaggtaaatttctaattctgttgttatgatttgtttctgtgaagaatcttatacaattatcaactgttatatgaaatatattatgtcacatcaaaaattaaacagtaagaaaagacttctttaaaaactgaggcaaaaaagcaagaatgcatttaacaacacaatgataattattgccaacaatgaaattccactattttacttaactaaatcaacacttcaggaaataaacacagcattctttattatagagttgactcagtctttacataaaaaagaaagtgattttcaatatgtcattaaactgtagactaatgtatttacagataagtaattaaaaagcaaaaataggtcaaagaacactgaataacttattgcaacagaaaatatgttcatgatagtgaccaggcaaaagaactctatgtataccttagtacctaatagtgactcacatgcataaaaagaaaaatatcggccaggcatggtgagtcacacctgtaatcccagcactttgggagtccaaggtgggtgaatagcttgagtccaggagttcaagaccagcttgggcaacatgaagaaaccctgtctctacaatatacaaaaattagctgcatgtggtggcgtacccctgtggtcccagctacttgggaggctgagctgggcagatggcttgaacctgggaggctgaggctgcagtgagctgagactgcaccactgcactccagcctgggctacaaagtgagagcccacatcaaaagaaaaagaaaaatatctacaagtagctctaccaacacagagaaattcttattaggaaaagtgcactgtgaactaaaataattcagttggatttattatatctataagagagatttaccttaaagacatctgcagagatgtaaatttcagcaaagttttgcagctatagagaacttttctccagattttataaagaattattttccttattaaagagtatgtatgaaggctagtcgaagaattattggataggtacaaaaagcataaagtatcaaaaaaattgataaaagaaaacttttgtttaataaaaattgaaaatttcttttgaacaacactgttaagaaagtaaaaataaaagccataaacaaggggaaaatatttgtaatatacatatcagaaaatggactactatccagaatatataaagaaccctcacaacttaataattagaaatgactcaattaaaaatggaaaagatttagacacttcatcaaagaatataaatgaatggcaaatatgtatatggaaacatgctctatatcttgtgatttgttgagcatctactcatacctaataacttcattacttgttaggaaagtgcaaattaaaaccacaatgagacattactacacacctgttagaagggctgtgttaaaaagactaactatgctacatgctggtgaggatgtaaagcaactgtatctctcacacactgctaataagaatgtaaaattatataaccactttggaaaacagctggcaacttcttaaaaagttaaatatgtactcagtacataacccaactattccacttctaggtagttacctaagggaaatgaaagcatatgtctataccaaaacttcttcatggatgttcataggagctttattggtattagccaaaactggtgggaaaatgttcattaacttataaatgaataaagaaagtgtggtatagctatacaatagaacattacttaaaagcaaaaaggaacaaattattgatgcaggcaccaaggatgaagctcaaaagctgtatgctaagtgaaagatgccagattttaaaagtatatgctgttcatttcatttatgtgacattttagaaaagacgaaactacagttaaagaaatgaacaaatagttgccaaaggctcaagagttgaaggaggtggagaagattaactacaagggacatgaatgaaattttgtgggtgatggaaatattgtatatcttgattgtggaggcagttatgcaactgtatatttttgtcaaaattcataaaactgtttaccaaaaaaggataaatcttacagtatacaaattactattattattacattttttttttgagatggagtcttgctctgtcacccagtctggagcacagtggcgcgatcttgactcaatgcaaactgcctccgggttcaagtgagtctcgtgcctcagccccccgagtagctgggactataggcgtgcaccatcatgctaatttttgtttttgtttttttttttttttttagtagagacggggttttgcgatgatggccaggctggcctataactcatgagctcaggtgatccgcctgccttgacctcccaaagtgctgggattacaggcataagccactgtgcccagcctcttactgtatacaaattaaatatcaatcagctttactttaataaaacaaaagacatgttatatttatgtgacttatctttaaagtttaataatagaaaagtattttatacaacctggattccagatagaactgtcgtatgtagtaaatcaaatattatcatttattcaatagtaaaaacaaaattgctacctaaacttatgagtaaatggttttatatttttaaaaataattaatgatgagctgctaaatctcaaaaatttctcccctgtaaaagaatgtatgctaagctgaacggaggttttcccattttacactttggagttgatcattctcagctaatcttttgtcacctttagaaagccccaagttaaatacctctcttaggaactctaaaacatagcaatgtgaaccaagtggattccaccagtcacatttctgctttttcagagtgaacaaaatacagcaattagtaggagcaccctttatataattctaattttaaggattattttaacctacatgcatgacatgttacctctggtctatagaacactctctaatgtgcagtattgaaagaagaggcatgctttcaagggcaaacctgctgaataactgcagcaaatgcacactcatgaagactgacacccccgagctgattccagctcactgtgtgcaatctgaaactaagcaattggatctgactgagaaagaatataacttctcattattgtttctgagctttctgaaacagagtatctggcctggcacatgatagatatacttacttctctctgtttattttcatctcattgtatggaatatttcccatagaggactcacaagggggattgtaggaagttgctttaggcactagcagaatggcctaatcatttaattttttgcagttatggaaggaatcatgaaaggattcatgttaagggaagaactgcagctgccccctagagcagctgatgcttagcatggcactagagtgacacatccataagtcttaataaagcaccatgcattaatctattagtaggaactcaaggaaatactccagtggccaaaccagagtgaggctgtggtaaagactaacaagatggaagaggaagaagtattacaaagaaacttagtaataatgttttctctcctactcacaaagaattctctatcttcaaaattgagaagaatgctttactgtaaaggaattattgttgcaagagtcatctgggtatggtgggaattgaaggacaggaagctgcccaagcaagtcacatgtgtattgaggttactagtccccactgatatacagggaatcagtaggaactgcaactgccagctcctggaatttcagcaacagaaaaaataacggagttgcaaatacagaaaaaatttacttaattttgtaaaacataaaagtattatgcaagtcaaagtttgaggggagacaaatacagctgcttgaccaggttctttgaggtctagagtcaaatctgtttgcaagcaatggggtaaggtcaagtgggttgtagttaataacggtactgcagtgggaatgctgaacttagcatcaaaaaatttacatttgggccaggcgtggtggctcacgcctgtaatcccagcactttgggaggccaaggtgggcagaccacaaggtcaggagatcgagaccatcctggctaacacggtgaaaccccgtctctactaaaaatacaaaaaaaaaatttagccaggcgtggtgtcgggcacctgtagtcccagctacttgggaggctgaggcaggagaatggcgtgaacccaggaggcggaacttgcagtgagctgagatcacgccactgcactccagcctgggtgacagagtgagactctgtctcaaaaaataaatcaaaaaaaatttacatttgattgttattataccacttgctagctgggtgacctttggcaagttgctgaacttctctggaatgaagtaaaacaaggaatatgagtgtctggcactagcaaacaccaagtagaacttcacttgatttgtgcatctattgtggagatgtcaatgcatgcagttcagtttcatgtgatgaacatttattttttcatttactatcataagcagttcattgagatagagctcatcagtcaagatgtcaatacttttcctgagtaggaccactcagcgggggtcactctttcagttgatccacttaaatagttaacatacactcccttcgcttgtgtgtacttactggtaaattactttgtaagcattcttgtatctgttcatgtgtgcatgccctgtctactcaattaggattattgacttattgagccagaaggcattttagagaactaggccaaactcttcattgtacaagtgggaatattgaggtccagggaagtgaaatgacatgcctcaagtcatatgttggttagtgactgagtcagtattaggatccagttctcttgacttcctactcaatgctttcttctcccatattctcaccccaaactattctaaaaataagcatttgaggacaagaaccacttttgctgctattgttgtttattcctaaaattcagtacacatttgtgcaacctaatgaccaaggacattgaaaactttcaacatttataaattgttctattcagaaatagcagaaatattttctagtgatcaatttgtttgataaatcccattctctcctcatgaagttattaatattatcacagatacaggtatctttatgctttataaaacattttcacatctattgtcatacttgattagtttagaaaccttgcggaaaaatcagagtgggcagtcttattcccattttacagttaaagaaatgaaagtctagagaggctaaataattttcccagctacacacagctactaattgatggaactggcattcggacgaactcgggttttctggtttaataatccaatatacttccacggttctatgctgcatcacatttataggtacacttttaataaactattaactttgattatctgtactgtattggtcagattctttagtgtacaaatgactaaaacccaattcaaacaagtttaaattaaaaaaaaaaaaaaaaaaaaaagtcaagggccagggaggattggaagaacgcagaactcactggcttaagatcactaaaccatagggaaggcaaagatagaacagcctgatgaacggtcctaattctaatctttgcagctttatcaccacaacaaagaggacttttccttcccagttctgtttggaaatcataaggaaaaattgtgatagagatcaggagtcaacttgtatcctatgtttacctttgttaaaccaccttaaggaggtatgattgacagattaaaaagctgtatatatttaatgtgtacaactcagtgagtttggggataagtatacaccgtgaaattatcaccaccaacaaggccatagacatccatcacctcccaaagtttcctgccattccctttattattattttatgtgtgtgtgtgcacgtggtaaaaacacttacataagctctaccttagcaaattttaagtctacaatacagtatcattagctataggtactatgctatacagatttctaaaacttatttatcttgccaacaggcaggtgatggtcaaagggtacaaagcttcagttatttcttaaagtcttagaccagtcatttcaaccagagtctagtatcagaaaatcgagagatggaaactaggcagtaaagaaatcaatacttgtttactattctcatgttcagacagcaatggaacaactggctataaaacaaacaaactgaagaaataaaatatctggtatgttgcatttgctgatttcttttttttttttttttgagacagaatctcgctctgtcacccaggctggagtgcagtggcaccatctcggctcgctgcaagctccgcctcccaggttcacaccattctccagcctcagcctccccagtagctgggactacaggtacccgccaccatgcctggctaattttttgtatttttagtagagacggggtttcaccatgttagccaggatgatctcaatctcctgacctcgtgatccgcccgctttggcctcccaaagtgctgggattacaggtgtgagccactgtgccctgccttgatttctttctctttagtttttccttttctttctttctttcttttttttttttttttaaatgatacagggtctcattctgtgccccagtttagagtgctggggtgcaatctcggctcactgcccccttgaactcctgggctcaagtaatcctcccatctcagcctcccagcgtttgctgatttctaataaataaaatttgcatttactagtactcccaccatagctgctttcaaggtaccaacgtgacatcaatcagctcataagattcctaaaaacatagcaattagatcttgtggaccagcaggaatcagtctcagcacaccatggcatgtagcactgattaaccatactctgacctaaacagatcaataaattcatagaagccaccagttcactggcagatgtacctttccacatctggaaaggggaaacaattcaattcagcaagcatttatttagtgcctactaaatgacaagtgttggggttgtcaatatgacaataaaaagatactttcccatcctctaattcactgtttcacaattgtttttagatctcatactaagtttaagtgagaaaactagaccaaaaaaaaacaaaaataaaattgagttatgataaatgctgtgaaagaaacaaaaaggactcaaatagagaatgagaggtgaccatttaaagtaagtatatttcccaaacttgaaatgtgctaccgatttgttattaatttaattgtttcaaaattttaatttacaatccttttatttttaattatttatttatttttattcttgagacaggatctcactctgtcacccaggctggagtgtggtgatgtaatcactgcagtcttgacttcctaggctcaggtggtcctcccacctctgcctcccaagtagctgtgactacaggtatgcaccataacacccagctaatttttggatttttcgtagagatggggtttcaccatgttgccagagctggtctcaaactctctgggctcagccgggcatggtggctcatgcctgtaataccagcactttgggaggctgaggtgggtggaccacctgaggtgaggagtttgagcccagtctgacgaatatggtgaaatgccatctctactaaaaacacaaaaattaaccagtgtggtggtatgcacctgtagtactagctactcaggaggctgagacaggagaattgcttgaatctgggaggtgaaggctgcagcgagccaagactgcaccactgcactccagcctgggcaatagagcaagactccatcttgatgaaaaaaaaaaaaaaacaacacacacacaaacaaactccttgggctcaagtgatctgtttgcctcagcctctcaaagtgttgggattacaggcattagccactatgcccaccctgaaatccatctataaattacttttattattataattattcattattatttttacttcttttaagtaaaagcacagctcttctgctgccctgtcaattttacacaattacgtctctcatctctttaaaggacttgtttctaatgcccaaatatgagaaccattaatccagagaagcaatgaactggatccaatcaaacttaactctcaaaagaaggaaaccgagctgaggaatgcaagagaggtaaagggaggactcttggcccattattctctatggaaatctcttcttccacaaaagctcaccagtagttgagtttaagtgtgctcaatgttgtctttgcctcattcatgtattaagtatttaggagcccttcctcaatcatttggtgtttatttattgagcatttgctctgtgtcaggcatttttctcagttgctgaggctacagtggtgagtcaaacagataaaacccatggtctcatggagcttacttaaaatgaacaactaaagaagaaaaataagatggtgataagtgctgtgcagaatattataatagagtgatctgataaagacagtgatatggtttggctatgtacccacccaattctcatcttgaattcccatggtgtggtaggaggggcccagtgggaggtaattaaatcatgggggcaggtttttcctgtgctgttcttgggatagtaagtctcacgagatctgatggtgagatcttattataagggggagttttcctccacaagctctctttgcctgtcaccatccacataaaatgtgacttactcctccttgccttcgccatgcctgtgaggcctccccagccacataaaactgttaagtgcaattaaacctctttcttttgtaaattgcccagtcttgagtatgtctttatcagcagtgtgaaaatggactaatacagtaaattggtaccagtagagtggagtgctgctgaaaagctacccaaaaatgtggaagtgactttggaactgggtaacatgcagaggttgaaacagtttagagggctcagaagaagaaaggaaaatgtgagaaagtttggaacttcctagagacttgttaaatggctttgatcaaaagcctgatagtgatatggacaaataggtccacgctgaggtggtttcaggtggagatgagaaacttgttgggtactggagcaaaggtgactcttgttatgttttagcaaagagactggcagcattttgctcctgccctagagatttgtggaactttgaactggagagagatggtttagggtatctagcgaaaaaaatttctgagcagcaaagcattcaagaggtgacttgggtgctattaaaggcattcagttttataaaggaagcagaacataaaagtttgggaaatttacagcctgacaatgtgatagaaaaggaaaacccattttctgaggagaaattgaagccagctgcagaaatttgcatacgtaacaaggagccgaatgttaatctccaacacaatggggaaaatgtctctagggcatgtcagagggcttcacagcagcccctcccatcacaggctccgaggcctagaagaaaatggtttcctgggccagggccagggtctccttgctgtgtgcagtccatggacttggtgcaccacatcccagccactcgagccatgactaaaaggggccaaggtacagctcgggctgttgcttcagagggtggaagccccaagccttggcagcttccatgtggtgttgagcctgagtgtgaacagaagtcacaaacaggtttgggaacttccacctagatttcagaagatgtatggcaacgcctggaggcccaggcaaaagttttctgcaggggcagggctctcatggagaacctctgctagggcagtatggaagagaaatgtggggttggaacccccacacagcgtccctactggggtactgcctagcggagctgtgagaagagggccaccatcctccagaccccagaatggtagatccactgacagcttgcaccctgcacctggaaaagccgcagacacccactgccagctcatgacagcagccaggagagaggctgtatcctgcaaagccacaggagtggagctgcccaagaccatgggaacccacctcttgcatcagtgggacctgaatgcaagacctgtagtcaaagaagatcatttgaaactttaagatttgactgccccgctggatttcagacttgcatggggcctgtagtcccttccttttggccaatgtctcccatttggaatggctgtatttacccaatgcctgtaccctccttgtgtctaggaagtaactaacttgattttgattttataggctcataggtggaagggacttgtgggacttgtcttgtctctgatgagacttcggactgtggacttttgagttaatgcagaaatgagttaagactttaggggaatgctgggaaggcatgattggttttgaagtgtgaggacatgagatttgggagggccaggagcagaatgatatggtttggctgtgtccccacccaaatctcatcttgaattcccatatgttgtgggagggacccagtgggaggtaactgaatcatgggggcagatctttccgatgctgttctcgtgacagtaagtctcacaagatctgatggttattatgagggggagttttcctgcataagctctctctttgtctgccaccatccacataaggtgtgacttgctcctccttgccttccaccatgattgtgaggcttttcccaccacgtggaactgtaagtccaattaaacctctttcttttgtaagttgcccagtctcaggtatgtctttatcagcaccaaaaatggactaatacagtttggggagttctttagattgggtggtgagggagggcctctctgtgtcagtgacttaaattaagatttcaatagcaagaaagaaacatcagtcccaaagtcaagattggaaaaagagttttccagaaagactgaatgttaatataaaagttctaatttagcctgctagtggcatgcatctgtactcctagctacacaggaggctgaggcaggaggattgcttgaacccaggagtttgaagttacagtgagctatggtcacattactgcactccagcctgagcaacagagtgatatcctgtctctaaaaaaataaaaagttaaaattaaaagaagagctctaattttgagaaaagggggcccagagtggatagagcatagaaaaagagaagaaagttaataggagctcagatcaagggtaggcagggccagattatatggagtaatggtttataaagtttgttcccacatcacctgggaacttgtcagaaatgtaaattctctacctacactccatgtttaccaaatcagaaactctggggtggggcccagcactctgggttttaatagaccttctggtgactatggtgcgtgtgcaagcttaagaaccactaatatacaattttatagatcaagacagataatttgaattttagtctaaactgcagagtcaaagccattgataggtttaagtcatggggagaggatgtatgacatcactggatttgttttcaaaagtttactctgctttggacaaagtggaatgtagagaagcaagacttggagcagggcaatgagttaaaaggtttttcagcctagaaattagggtatctgagattagggtgccagggatggagacaaagagaaatggatagatttaggatacatcatgggaatccccaagactcagtgagtggcaggcaaaagaaagtgagggatcaaggataaggcccaggtttgggtcccaggaaacaaggtacactgtgatgtcattaggggaagtgaagaagattagaaaaggaggatatttgggggtgaaatcaggagttctctttcagtcatgttgtgtttgacatggctaatagatttatacggctgtgtcaggcagtttgatggaaaagtcaggagttctaagaaaatgtaccaacaaaagtatgtttttggattcacctgtacatagactgtgtatcttatctaaacccatgggaagaaatgggatcacctgagaaaaggatgtgaataaagaagaaaagagcacccagaacagagcccttgggcacctaatatttactgatctgactgaggggcagaaccgttgaagaaagtgcaatgtgtgagattaggaggacactaaagaaactaagcgcttggggtcatggagtcaagtggaaagaatctttcaaaaaggaagcatcagctttgttgaatgctgcagaggaatcaacaacacaagacaaagcaatgggccctcctggatcattgctgatcatgatgagagaagtttccatgcagtgaaagaaaccacttagaacgtgtacaggagagaatgtgaggtaaggaagtagagaaagcaaaaaataaacaacttggaaacgatgacagataaatcggaagaaattggaagcccatttggggttaaggcactttccagtcactgtataagagagacggtaaagactcagagagctttctcatacaagagagaaggcaggaaaggagcaaataatatccccaaatccaaccaatcacaatggtaataaatatataggacagagtagcattcaatgagcatctacaatgggtaggcaactatggagatttacaaagagtaatcaaaatggaaaaaatgaatgcacatttaggtaattaaaagccagtgtgtgttaactctacagcttaggtacaaagtgctttgcaatcaaaaagaagaaagggatctactcttgtttgaacttcagtcttcaagaaaacggatagagaaaaactagcttctaatgtagaggggctagtatactagagactaattaagggaacagtgaatcagtaaaactggaaatatcacatttcattccaattacattccagagaataatacctaatattataaatttctgacttttaaaataatgttatatgttttattctccataaatagaaaatagaagaaggtttggagacctacatagagagacagagactgagaaaatatgagattaaagtctacaaggaataatatacttattaagcagttattaatctattacgtgtcaatgtttgttgtgatactttcatacccattgtctcatcaaacccttggtcagcctcgactggacactttcattttattgggaaacatttattccttgcatggtcattgtagagaaaattacatttagtttcttctaaggatgtctctcaataaatttatctcctccccaaacaaatgaataataaattattttccttctctctatattaattaattgggcaactattagttgcaagaatcttaattggaagaaaaaaagaggttttttgtttttttcattcaaaggatttccaaacaatgagagagagactacagaaggtcatcttgtatcatggtttccaaatctggctgtacaactaaatcctggggaaagcttcttgaaaacacagattcccagactttactcccagaaattctgattctgattctgctcatctgatgtgcaggtagaaagctgcggtgcttgggaggccgaggcgagtggatcacctgaggtcaggagttcaagaccagcctggccaacatggtgaaaacccatctccactaaaaatacaaaaattagctgggtgtggtggtgtgtgcctgtaatcccagctacttgggaggctgagacaggagaatttcttgagcctggaaggtggaggttgcagtgagccgagattgcgccattgaactccagcctgggcaacagagcaagactctgtctcaaaaaaaaaaaaaaaaaaaaaaaaagaagaagctgtggtgtttaatagatcctcaggcgattctggtgtgcagccagttgtggaaagcacaactctgaaacaggcagttctcttgcaatttatgttttcataacatgactattaaaatttgagaaattagggaacactatttgcattgcaaggacaagtattgattgtaaagggatggccaacaactagcaatgtgagtaaagagaaaaaattctgtcgtccacatagtgtattaagaacgctcttgctggccgattgcatctactttgtttgagaggctctgagcttcgttttgcaataacaagagatataacaagtcaataaaaaagagtgtacaagatgttccaataatgagcgtgccggtggttaaaggagaaaaaagccacttcgctttagacaattaaatgctggatcagctcagtgatgtttgaggattataactatatgtttagcctatggaaacactctcattattaaaaaaatttttaggaaagataacattcattgcatttatgtatttatttttgagtcagagtcttgctgtgtcacccaggctggagtgcactgacgtgatctcagctcactgcaacctctgcctcccaggttgaattgatccttgtgtctcagcctcctgagtagctgggactacaggcatgtgccaccacgcccagctaatttttgtaattttagtagatatggggttttgccatgttggccaggctggtctcaaactcctgacctcaagtgatccactcgcctcagccacccaaagtgctgggattacaggtgtaagccaccacattcagctgatttgataccatctgaatacagtcttatgctacataatgatgttttggtcaatgaatgaccacatacagagcagcggtcccataagattataatagagctgaaaagttcctgtcacctaatgacaattatatacagcccataacacttgataatacagaactatgttactggtttatgtatttgctatactatacttttcatcattactttagagtgcactcctacttattgaaaaaaaaattaactgttaaacagcctctggcaggtccttatgagttattccagaaaaaggcactgttacaggagatgacagctccacgtatgttattttccccaaaaaccttcctgtgggacaagatgtagagttggaaacactgatattgatgatcctgaccctgtgtaggcctaggctgaagtttgtgtttgtgtctttgtttttaacaaaaacgtttaaaaagtaaaatcaataaggaaaatttgtaagaatagaaaagaccttacagtctgggcgtgatgactcaagcctataatcccagtactttgggaggctgaggagggcagatggcttgagaccaggagttctagactagccttgctcaacatgttgaaacaggtttcaacatgatgaaaccctgtctctataaaaattacaaagttatccatagtggtatgtgcctgtcgtcccagctactcaggaggctgaggtgggaggaacaattgagcctgagaggtcgaggctacagtgagccaagattgtgccactgcactccagcataagcaaccaagcaagaccctgtctcgagacagagagagagagaaaggaaagaaggaaggggaggggaggggaggtgagggaagggctgttcaaaaagaaaaaagcttatagaataagaatataaagaaatatttttgtacagatgttccatatgcttgtgtttaaagctaaatgttattacaaaggagataaaaagttaaaaaaatttagaagtttatgaagtaaaatagttatcgtaagctgaagttgttttactactgaagaaaaaaatcaaaataaatttagtgtagactaagtgcttttatagtttacagtagtgcacaataatgccctagactttcacactgactcactactctctctctgtctcactcagcgcaactttcagtcctgcaaactctagtcatagttagtgccctatgcaggtgtagcattttttatcttttgtatcatatttttactgtaccttttccatgtttaaatgtttagatatgcaaatacttatcatcgtgttctaatagcctacagtacaataacatgtcatgcagatttgatttgcagcctagaagtaacaggctatcaaatggcctaggtgtataatcggctgtaccatgtagatttgtgttaagtacactctatgatgttcagataaccaagaacataattgcccaatgacaacacatttctcagaacatatttccattgtcaagtgatgcttgactgtaattgttttggtaactcttcttaaaaataacaccatgtttctgtaaggaaaagcaaaatttagaatttagttgttttggtaactcttcttaaaaataacaccatgtttctgtaatgaaaagcaatatttagaagtagaatagactacgttctctgtccatgaatagatatcacagtaaatatgcaagtgtgtgctggaagcaaacacaaggggcacctaatttgagggtcttaaaagattggtaagaattatgttgaaaaggtaggaggcctacttaacttcttcttattacttattacatttgtcataacttactgtaataacactacttattacatttgtttacctttcccttttaggtgttagagagattttccattctcttcgtttattctacagtctcaccattctactaattaggaagttctcaaaggctctaaattcttttctctgtaattccaattcattcctaagaggatgcttttgttgacagaaagaaatcctgccttataatctcaacacttgggtggtttgatttctgaacagagacaggtattgacctctatgggcaactcaaggctcctttcttctccccatcctccttttgctcccgcccagggatgagtcagggtgaggaggaaaacacttcagccttcaaggggcaggagtgctggatgacagacttagttggcaggctgtgctttgaagggtagaagttttaacatatgataaaatgtcaccttattcgcatggatttttctcccctttctgtaggggtccctcaaacaccagctacaaccagggctgcttccaaatgagaagaggctgaccagctctgtcacttctgatgtcccccttaccagggctaggccagggcacagccagggcgcggatatctttgctttggggtaaaggggcttttttgcactccagctctcttggaatggcttcttctcagaacaatgggacaaagttccaaaattggaagtgaacttaggaggaaaaagtggtcattttccccagctttggttctagcctcttaactaaggctaaaaagaattctccataatccaaattctttctaaagttttacacaggcatgtatccattaatgacaaggaaaagttcggagaaatgcatcattaggtgatttcatcattgtgcaaacaccacacagtgtacttacacaaacctaaacagtttaggctactatatacctaggctagatggtatagcctattgctcctcggctacagacctacacaacatgttattctactgaatactgtaggcaactggaacacaatggcaggtatttgcacacctaaacatatttaaacatagaaaaggtacagtaaaaatgcggtaggagattaaaaaatgctacacgtgtatggggcacctaccacgaatggagcttgcaggactggaagttgctctgggtgagttagggtgtgagtggtgactgaatgttaaagctaggacattactgtacaccactgtagactatggaaacactgtacacttaggctacactaaatttattttaagtatttgctttaataataaattaacattagcttactgtaacttttttactttatgtgatggttaatactgagtgtcaactttagtggattgcaggatgcaaagtgttgatcctgggtgtgtctgtgagggtgttgccaaaggagattaacatttgagtcagtgggctggggaaggcagacccacccttaatctggtggacactacctaatcagctgccagccaatataaagcaggcagaaaaacgtgaaaaggcaagactggcctcgccttccagcctacatctttctcccatgctggatgcttcctggcctcgaacatcagactccaggttcttccagtttgagactgggactggctctccttgctccttgagcttgcagacagccttgtaggaccttgtgatcatgtaagttaatacttaataaactcccctttatatatatacacacacacacacacacacacacacacacacatacacacacacatatgctattagttctgttcctctagagaaccctaatgcactttacatatattttaatttttaaactttttgactcttttataataacatttagcttaaaacacaaacacattgtacagccatacaaaaatattttctttctttatatccttattcaggctatatatcctttatatttttttattttttaaattattattagtttacttttaagctttttttgttaaaaactaagacacaaacatacacattatcctaggcctacacagggtcaggatcatcaatgtcactgtcttccacctctacatcttatcccactgtcttcaggggcgatagcatgcatggagctgtcatctcctgtgacaacaatgcttctggatacctcctgaaggacctgcctgaggctgttttacagttaacatttttttaataggtagaagaaatatactctaaaataataacaaaaaacatagtaaatatataaaccagtaacatagttgtttagtattatcagtattatgagctgtgcataattatattgctatacttttataaacctagcagagcagtaagtttgtttacaccagtgtcaccacaaacacatgagttatgctttgcattacaatgttaggacagctatgatgtcactaggtgatatgaatttttcagctccattataatcttaagggaccaccatcggatatgccacctgctattgaccttagcgttcttatgtgttgcatgactgtattgaggtttgaggacaaaccctgctagaaataaactgtttattcttttttgactgcattatgtttatatcatcccaagggactttgctcaagtttttccaggtgacctagcccaatcccatcctcattcattctattaatgacatccctaactttcccttcccacctcaatagaaaatgcaagcccaaactgagtcagtgttttccaccttggtgtctttccttttaaaaatgctgttctaggtagctaaagatattctggttgtgctccccactttcaagtggcaagttttttttgtgagtcaattactaagagtcttcaggactttctacccagcacttgcctagtaatttgctatgaccaacctacagcatctgtcaactcttcccatggattaatagatctgtaattaaaatccaacagagagccccaaaattaattaggacatgaaacagccatgtaagcagcatggagcacagctctgtataaagaaaagacaagcttcatgtaaaacaagtgtataccccaggcaggcctctgtccatctctcatcagctggcccctgaactgcctgtttctgatctgtaaactcattgtgaaagtgcctaatagagggcagccacacagtgggtagcaatacatcgcagtgactgcttgactctttacttgaaatataatcctcaggggagcttatttcttctatttacagaaaaaaggaaattttagagagatgaaatatctcattgctcacacctaggttttcccttcagatctccatgctctgtggatgaagacttcctttaagttttctggagcctaagcttatggacataatgtcatgaaagcaggatagtgctgcacatgtatctgcttcttactgtgagaccttgggcaagttatcaatactctgtgcctcagtgactagcacatggcaagtgtgcaaatgccaggtatgttattaatgctgattggcctctaacagaaagataatggtagtgatgtctattttctcttgttctcaagaggttatacctagggggtccatatgaactttaatgtacatccagatttataaaaaacggtttctgaaagcaaggtgccatgttttatgcaacgtttggcaattaactgttttctgttgttgttgttgtttgtttgtttttttaataatgaggccaggtgcagtggctcccacctgtaatcccagcactttgggaggctgaggcgggtggatcacctgaggtcaggagttcaagaccagcctggcagacatggtgaaaccccatctctactaaaacttagctgggcatgttgacacagcctgcaatcccagctactcaggaggctgaggcaggagaatcgcttcaacctcggaggcagaggttgcagtgagccgagattgtaccactgcactccagcctgggtgacagagcgagacaccatctcaaaaaataaaaataaaaaataaaaaaaataagaatgagccagaagtaaaatgtccttcaacatacctatgaaaggagatatattaacacatccaagaattcactccttcaatgataaaacgtccttctaccctgaatagctacaaaattgtaccttttttcttgtatggtggaagaagagaatggaaatttcttccaaaatcgaagttgtcttaagattggcagccagagcaggaggccataaaacactgtcagagatgacaagggttgaattaagttccaggaactgttaagagcaatgtgaaggactcatctctggtcagagataactgggcataaaagcgtattgattaataatgtaaccttcctttaaaccttttcccaggcagtccagaaaccttcactgcactcaggtgagaaacatgaaaagtttttcctcaagattttcaatagaagcaacaactgcaataaaccagacttgtcatggaacagttttcaccatatggggccctgatgcctcactgagcagtgactgtcaggcctgaggtgggtacacatccatgcttcctcctcgtcaaatgcccccagagaaactggctgtgcattttcaagaaaaaaaatgacttaggcttactcaatccattcagcgactaggcagaaagtataaaacaaatgatggagaaatctcccaacgtagccaatatttgctgataaatatttgacacacacctctggttcccaacctacagaaagaagagaatgtcacctaggctcttcggagttgtcagaaatagatattcatcgaggttacctctagcaatggaaaatcagctgtgaggctacatgtggaaataggaaaaacataactcctccaggaacccagcgatggctagactgaaggtggaatgcagattaatcatggtaagattattttaggacacacaattcccaagacccacaacccccaccaatgtgaattttctccaattctctagtctcgatcctattaactaactaccccaccctctagttggttatctttttaaaatattttcattttactttactgatagcttctgattactcttggctcctgatgcagctgatcccactaacaattgctctgtctgtccatctgtctgcctatctagagacaccagttattacaaagatctcatacaaggtccctgccaggccaacatattgggactggctaacagatttgtcacccttactttggatgccccctcctaatcgaatcagccaaaatgctggggtcgaatgattcagcacagggattttccaagtatgacctgcagggcaaacctgacctgccatctatgtttgtacattcattagtttatatatcgtccatgactgcttttgtgctacaatggcagacagagttgactagatgccagcagagcttaaaatatttactacctggcctcttacagacaatatttgctgattcctgattgagaatacggataagcgttcagtgtaagaaagtgcaccggaaaggaactgtaaatgggttttcttaggaagggctcaggagtatagcagatattctgaggccaaagatctcagggaagctgcaggttggtcttctttggtccatatacacgccatacactaaataaacatgtacacatacaagtatatacttatatatgtatgattttacatgaaaagtatatacaagtatatacttatatatgattttaaatgaagatataaattaattcatttaaaagtgaaactgattctatactatctttaataactttttttttaacatgaatcagaatgcaactctaatcacgatgcaaacccctgatttagcaatatcaaaactgtacatgacctgttttgcattcctatttagccctggaatgcaaccaatgctattgttgttcctatgtttttgtaaggaacatggttggtaggacattcactttataacttggggctaagactaatagaaaatactatgatttctaccactttcatccctactacttttgaagctcatcctgatctttttataattaagaagcttaatgaggaaacattgtgtgactactaggctcaaggacttgaggaaaagtaaattttctgcccatctgcatgaagaattaactttgtccactggtttataatttcttccttacttgattgtgagcactgagcacttgggatgcagagattggattttagcttgttcatatacactaattcctagcatcgtgactggcgcatttggggacttcattatgtgtttgtggaatgaatgagtgcatgctgtcatatgttctcattgctcagttggtaaagctaacatagaaggacttataactgtaaaagacactaggacacctttgtaactgctctcaccactacagagatgggctagcactgaaaagtaaaagttgtctctataaaagagtgaggcacagaatacgtgagtttcagactgaccagagctctcttcccctacgttgcattggtcattacactatttggtcatcacattatttgttctcaggcctacactaacaggcctgggtctaaccctatgctgcccagatctttaatccaggactcaatcctccatgcaaagttagttcctggtttgtactcccatgatactgtgtccatatttttgtttaacacttagactgaactgcaatgatctgcttactaggaagtttccctcactggcttagaagtccatgttgtacctctgtataaaattcaataatgtgtgataaaggaaggaaggaataaatgagctaataagcatgtaaaatataagtcactatcccctttcatctccttgatgatttaagctgattgatcgtgacatccatcctcgttagacccaccttcaacctctcccctttcttaatggttttgcctctccaaacggtctccaacaatagttcaaagttggggccaggtgtggtggctcatgcctgtaatcccaacactttgggaggcccaggtgggcggatcactggaggtcaggagtttgagagcagcctggcaaacatggtgaaaccctgtctctactaaaagtacaaaaaaaaaaaaattagctgggtgtggtggtgtatgcctgtaatcccagctacttgggaggctgaggcaggagaatctctagaacccagaggcagaggttgtagtgagccaagactatgccactgcacttcagcctgggtgacagaacaagactccgtctcaaataaataaataaataaacctcacacacaaacacacacacacacacacacaaagtttgcataactataggtatgtatgtgttatcagagattcaaatcccagacatggcctttgtgaaagcatcccctcctgcagccacctaatttctgatacatgtcaaccttcccaagcaactcatttccctggaccccccatctgcctgctaaataagtaataccaggtttcactgccaatgtaagaccctcagggagtaaaaacagtgagcagcatcaatgtgcttcccagcagagcaactagccttcagcaaataaaacaccctgaaaacagctggctggggttcctggagccctcctccccctccaatgaatcattctgtagaatgtggctgcccagctaggcctttgggagaattcgataagttaaacaaggctgccctctcatggttaaaaaaactacctgtataaaatgttttctatttttcaaacacaagaaatccagggcaccccattgaaaaacctgtgtaatacttatctttttaaagcagataatttaaagtatgctgcagtcagcttctaagaaacaatgaatgataaatagaagtgaaaaagtatattccaaattttaaaacttgctctagattgaattataatcaacaagaattcattactgattctagaatttaagtagatgaaataattgcccaaacttgataagccaataataaaaaatgaaacaaagaattgcttaatgcatgggatttctgtcttaggtaatttattttagactttagttggcttacacagcagtaacactggttctgtttatatattaattcatttagtaaatatctgcaaagaatatactagagaatctcaactactgtaagatgtaattttttcctccatatttttaacatctttaatgcagccaggtgtggtggctcacgcctgtaatcccagcactttgggaggccgagttgggcagatcacctgaggtcaggagttagagaccagcctggccaacacagtgaaaccccgtctctattaaaagtgcaaaaaaaaaaaaaattagccaggcgttgtggtgggcacctgtaatacccgttatttgggaggctgaggcaggagaattgcttgaacctggaaggcggaggtggcaatgagccaagatggcgccactgcactccagcctgggcgacaaaggaaaactctgtctccaaaataaaaataaaaataaaaacatctctaatgcacctcacaacctgtggtatgttataatctctgtcagccaggcaacagcagaaatgcatacatagttgtcattgcgtgggtatgtgcgatctgcttgtcatttctgatggcttatgggacactgacacccttgatatttcagtcccaaatctatttaaggacaatttggggaagaaaaacaagtcctgtttgttgtctggaaaagctttcattgatactttctagtaagatcaaaaaagcaccactatcaaaatttaaactgagtgtcaacagcttataataaagtattgggagacaatagcagcactctctaaaaaaatgcagtgtcaccagtgctgatagtggcataaaagatgacagggtgtggaaaaacacattgatgtctctgagtcaaggagtgagtttggagagctggattctgtatgggaagaagaaatagtatctttgttaattaattaattaattatgagatggagttttgctcttgtcgcccaggctggagtatcttggcacaatctcagctcattgcaacctctctcccaggttcaagtgattctcctgcctcagcctcccaagtagatgggattacagtcgcccaccaccatgcccggctaatttttatatttttggtagagacatggtttcaccatgttggccaggctgatctcgaacttgcgacctaaggtgatccacctgcctaggccccccaaagtatgggattacagacgtgaaccaccaggcccggccatctttgttaatttattttgcttacattttccttttcacatttgtaaaagagtcatatatgcaaaacgtcatgtccaatgattctcaaaatgttatttaaataaacacaaaataaaaattataactaataaaaaagtagtatctcatagtttaactggaagcttttttttcctttttgttgtgccaaaaaatagtgcatcttatcacagaaagagttttagatataatgaactatggaacatacaaggcggtgttgcagtcactgaataatgcagtgatgagcaaaacagaactttctgtgccctccccaagccagataagaagacatctataaacatgcaaacaaatgaagaaatgagagcatttcaaatagcagtaaatgctatgaagacaataacccagaataagaggataaagagaggtggggagggcaaggaggctttaaatcagcactgtaggtagaatcaggagaagcacaggggagctgcacatcacaccatagtaggtaggagaagaaatgcattcaaggagcaggcagaggtcaacagtgacaaatggtattagaagagaaaagaaggtgaggtgggaggactgttcttaatatcagcaagatgatgtcttttaaaaatggtattatagctggactaaaactaaaacaggttataggacgaatggatgaccaaatctgctctttttggggagatctgctttagggcctgagggaaacagttggcctagagggctgtggctgcagcgcaatatagaatcacaagggtatattttgtggagcaagggagcaatattaagtcttgcaaggcaagtaaacaaataattgcacaaaacaatttcagattataaacagtgttataaaggacataaccaagatgatatgatggaaaacaggaaacagaagcctactttaagctttgggctccaacagttattgaacaccaaggacatgccaggcatttattaagagcattcaaatgtcaactcatttaatcttgagacctactttttgagatatgttcaattagttccattgttgcagataaagaaactaaggttctgaaatagtgatttgtctgtcaaagatcaattagtaaatggtagccctgggattagaaccaaatttgacattgaaattaaatgtgtttcccttgctgtacaccccttccttcaaggctttcctgcaagacaaacctcaaagcagctagcctttcacaacccctgccgcaaaatcccagctcatggtctctttttagagccccactcctatgagacctttttcaattgaaccgatcaccaagttgcacattattcataacatgctagcagaagccaaatgtgtaattatactgacgctagtaggtaccgataggaccttcttttcccaaacagcatctttaagtagtggcttttagagagacactgccaaacttcaaaaggccattttctaatagtgaaaattttaggccacctggtagattggaaggataaatgatcacaataactagttaatatttattgagctttattatatgcccagaatcattccaagtgctataaatataatatcttgttatttttcaaagcaaccctatgaattcgaaattattttttaccacctgacagctgatttgagcccagttaatctgatttgcagactaaagctagcatcccaaaggaacacacaggaattaaatgacaaaccccaaatgagttgtatgcaccgatgatattataaaactcacagaaagctggttggcttggattttgaaaatattgattcctttggtttattttccagataaaactttggttttaagcctcacaggaatccactgagatgacaaatttaaccaacagataccctttagttccctctctcaatggagctttttaattgtacagatgagagaaaccaatgaacctgtttttgtgatttaaagattaatgtctggagaataattgtggtttaaaatcaatcaacaaacttctggttggcattgatgcataaggagcactgggcttgttgcttcagatactctccaagatcagccacagatccttgctggtggggatggcaggggctggcagtgtgatgcaatggaaaaaggcttaagcttggaaatgagaaaaacccaaattcacctccatattcagagtgactttaggtaagttagttaatgaaatgagagtaattattttttaaaaaataattctgaagtttattggagataccaaagcactttgtacagtgcttggcacagtaagaagtcaacaactgttcccctcttcactcttcctgtgccttgtcctctctcatcttgggtctctgagttcagcctgaaacccataaagacagaacaaaacagccctggggttggggtggggagaaaccctctcgtgtgaagctgatggagggttatcctaagagctggaaaagaaaggctgttctttaatttccacaatcaggagttgcaaagatatagtatattaagaaataactggaaataggctggatgtggctcaggcctataatcccaacattttgggaggctgtgaggttggaggatcacttgagctcaggagttcaagaccagactgggtaacatagtaagaactcatctctgtctgtctgtctgtctgtctctctctctctctctatatatatatataactggaaatacagtgaacatatattatgtacatgtggttttcaaaaacaatgggcaagaaattgtgcaaaagaaggtccattttaaggagaaataatatgtctttaaatgcacagggatttgattgtgttcaggaaagcgtgaacttcaatctagtttcatccctaaacagtattaaggcttttgacatcgacaatttctggactggacagtgtccatagagaagaaaaagcaaggagagaggtaaagaagaacatagagaaatccagaactgactgaaatgaaagttgaggataacttcaagattttctgtttgggaatttatggtacctttagcccatccagggacctttaaaattcttgatgaccttgaggcatccaagactagttaaatcagaatctctgaggtgggacccagatatcattagtctttacagcaacccagaaatttctatgcatatggttgagaatgactgctatggtcaaaacaagtaagtaaggtaggatattgagataatggagaaagaggatgagtataattctagacatactgagttcaagtttcaacaaggcatccaggagggaattaagggctggacctcaggaaggacacagcaacttaagattttgaggagtcattcattaatatattcaataaacatcccttaggctgggcatggtggctcatgcctgtaatcccagcactttggggggccaaggtgggtggatcacttgaggtcaggagtttgagaccagcctggccaacatggtgaaaccctgtctctaataaaaagacaaaaattagccaggcatggtggcgtgtgcctgtaatcccaggtacttgggaggctgaggcaggagaatcgcttgaacctgggaggcagaggttgcagtgagctgagattgcactactgcactccagcctgggtgataaagtgaaacgccatctcagaaaaaaaaaaaaaaatcccttaaggtctattgagtgtcaggacaccaagtcctacaaatgggtcctttttctttgtggggcctatatctaggaggcagggaacagatttctaaacaaatcagtgatataatatgttgtggactataagacagaaatctgtacctgggacagaaaagaagagttaaattcttctgggagttgtcagaaaagacttcataaagaagggacaaggagaaggtgggatgagagaaatgcagaaagagaaaaaggcgaacctcggaagtgtgggaagacttacttaggtctagcagaatggaaagaaaataaaatcaaatgaagatcattgagaattagcagtcagagagagagagagagaaaaaaaaaaaagtaggatagagaagtgtcctgaaagataaggctggctaacaaggaagggccatcacatgggtggtgcagagggtcaaagaggatgaggatgactattaaagctgaagatcacatagctatgaaagttagtttttatagtgggagagttgggggagagagtaggtagtgtttggaactagacccacggaaaaagagaaggataatgagaaggctagtggatacactatggggagggttatagggagcacatttaaatattaaaacaaggaacaagcccggcgtggtggctcacacctgtaatcccagcactttgggaggctgaggcgggtggatcacgtgaggtcaggagttcgagaccaaactgaccaacatggagaaacaccgtctctactaaaaatacaaaattagccaaacgtggtggcacatgcctgtaatcccagctactagggaggctgaggcaggagaatcgcttgaacctggaggcaaaggttgtggtgagctgagattgtgccattgcatccagcctgggcaagaagagtgaaaccccatctcaaaaaaaaaaaaacaaaaaaaacaaaaaaaaaaacacaaacacacaacacacaaaaaaacaatcaaatgagaaggcaaaaatctcttagctgcatgaatcatgatggtgggttatctttgttttctatacaggtgtacttgccaagttcggtcacttctttctacagacactgccccctagaacccacttctttcaaaatgtgaactagtgaagggcaccacctaccatctagagctctatccaagagggatgacatagcacagccattcaagtcacaggttctggaattagacagtccttccctagcaatgtgactatgtgaaaaattattgacttatttcccccccctttttttcttgagatggagtcactctgttgcccaggctggagagcagtggcgtgacctcgtctcactgcagtctccgcctctcgggttcaagcgattctcctgcctcagcctcccgtgtagctggaattacagtcacctgccaccatgcccagctaatttttgtatttttagtaaagacagggtttcaccatgttggccaggctggtcttgaactcctgacgtcaggtgatatgcctgcctcggcctcccaaagtgctaggattacaggtgtgagccaccgcgcccagccattactttggtttttctaacatgaaaaataaagtaataaccgtactggtctcataacgttattatgtgattaaatgagataacgcatgtaatatgtttagaacatatctggcatatagttctagcacaaaaaatattcgctattgaacaagaacagaaaaaaagcaggaccttgtgccagcaaagtatatgacttcccctattcctgtattcttcaagaggtcttgcactgaatcaagcagatcctttaaaaaagcaagacatcaggctcaataaacagattcacctagtgacaataatataggctttggaaccaggcagccatgagtcaaactttagtgaagccatttataaacttgatctttctgaatctcagattatatatttgtaaaaatgaggttaatactacccacctctcaggattgtgaagattaagatagatttctagttgcagacacttagcacattttacataaataaatgttgactaagtgttcttggaattgaaattgtggtaagattttactcctggtgtcattttacccctgtgggattctgctccttctctgacctcaacttagctgtgaattctattgtccccgctgctagactttactaacattaaccacgttgattttcatgcctggagagaagagggatcatgcagaacggaacagagtacaggaagagaaggctgcaacaaccaccacaacaccctggagggcacagggagagagaaaaacttctgccaggcattgctgagatagaacacaggtagcactcatcaaccttggttctgttcacccaagcatcaagtccagaagacactccttgctactgtttctcctctttctcggtgcctcagtcctgtcatgtaaggaaatcagacataggagaaaaaaacaaaaaaaaaaaaagaagaagaagaagacgaaaagaaaaacctcccacatagaagtatgttaaaaatctatctctctggatgctcggttcctttctcgttctcattaactgatagaaggccactgacaccaacattggcctaagctaaaattggttttctttttcagagattgtaggttgattctaggttgcagaaaaggcaaaatattttgctagaggcatggaatacagattaggttggtgatgtcacaaaagaggttttcaacagtgtcagcagaggctatagtgatgagtaaggaagttgataaacggcaacatctgaaatagctactcgccctgaataggcaggtggagaatattagttacacgtgggacaaatcccattatgagacatatcatcacaacaagaatatttcattctagattttagaatcccaggttttggctcactttggtcaagaaaaattataaataattgagttacagataattaaatgttagcctcctggagtgcatggcaattggttttgacctctatattaaaattcacaagaccacggacataagtcaaaacaggtccccttcgtctccctagtcaccatctccagggctaaaaaacagacttgaaatgggtggcagttagactacaggaaacaggatctacaagcaccaggagctcatctatggctatctgacatcgcctggggacacctcactctctggcaggctcctgctggctggagattgttaacatcgccaatcagatgttaattgaatgcaaaggaataggaaataaattctggttctgaaggggcagctggaaaggtgttgggcttctcagattccaacctacattacaaagcaggcctaaagccaagcatactccttgccagaagaaacggaaagcccctctcccgtttttagaatcaggctggaaaacacggctcccagaaggtggggttagaaaacaagagcttgcgaggcggcgccctgtggtccctcgaggaaatagtagagagacaaagagggcctgctcctgggaagccctaaattcgaagccaatccttcctcctagacatgaccacaactttaaagggcagggcgcacacctcccctcccggatctctaggacaaaggcaggtcgagggtaaatatttctagttattcagtatattcagtggctaactatttattttgtgggtaccagacaccgacataatcggttacgtccttcccttaattctcataattctgaggtttgtgttattaaccccctattatctttggtctacccagggcagccaaagaggcgcagagaagaatgacaaggtgcccagcaagcggcaggatcaaagcctgggtctctaattcccaggctggagattctgggctgcctgctcctcctgcacggggcgaaaagcccacctgggatccgagcgggcggccgcgccactctcgcaggctccatacacccgccactacccgcctgtaccacctgcagccggcagcgcagcctcctcgcgggtcccgcagggcgcgctgcaggtgcgctgggcgtcccgaagccccgccctcgcgtccctgccccgcgcccagctcctcacgctcggtgcccgcgccccgcagcggcagcgcagaacgcaccgcctctgccagagcccgggaagcgctcgggcgaagaggaggagccaagggtaccgagcgggtggagtcgggagccggagagcggtggaggcggatttcctgggcccggccctctggcgctaccatggcgtttggcaagagtcaccgggatccctacgcgacctccgtgggccacctcataggtaaggaggcgcggggagagacgcccaggcaggcaggggaccgtgggatcctttcctgcttgatccattctcggcctgcagaggacggagttagtccaacttgaaaaaattattcccctccccccgcaactttcccaaggcacccgcattccacccggccccctttcgtcgtttccttcttggccaactcactgtagaacctcagtcctcaaaaatgtaccttcctttcgatgccgcctggggagtggaaccaaacaggtgaaccgcgggagtcaggcatggagtgtttgggcctccacgaggagacaccagaaacttctcggtaggggaagttattcctaaaggcacattctccagggcacggtattgttatgcccgttttacagatcagaagaggaggctctgggagactaagtgatgtggccttactgtgaggggcaggtctccccaaaccagttttctctagtgccaagcttatacaacctggattacttttctgggtaaacaaagagaatgaaaatgcttggcattggagtgaagaggaggggaacataggagccatctggggccacggaggtctctcgcaggccactagggactacaccagcatccacctaaatgatttctctctcctccggatgtaccttgcatgatgtatgtagaagccagtgattggactcctaccagcaccagctcactgctccttcttttccctgattcctcccttgggaattgggtgtggcacgagtgcatattaatgccaggcaaagtgtgatgatgtcaggaacttagtggggtgatgaaatcgtgagaacctagtagttgtagtaaagaggcccagatttggaaaatttagatcacagctctactaactgctgtgacaccgaacacaccacttaaacagaaccttagtttacacatccttataagatggtcagagtagctaccattgaggagatgctttcccttaatggctgtgcttttttggatattagaatgaaccccaagcagaaatggattcagactgtgtcttcataggcaaacgaaacttcagcagttcttctgcttaattttttaattctgtaaacatggactaactgtcagctatgtgcctggacctggatcaggcactggtgaggccaaggtgagacgtggtctcaaacctgagggaactcactttcttgtagagaagacgggcacagttttgtgtggcacctttgcaatgcaagaaaatgcaaaacacacaaaacttaggagaagggagaaatgaattctgcgtggcttttgaagggtgaataggagttttcttttctagggaggtaagctttgtccattcggtgccagattcaagttttttgttgttgttgttttgtttttgtttttgtttttgttttgagacggggagtgacacccaggctggagtgcagtagctctcggcacactgcaacctccgcctaccgggttcaagcacttctccttcctcagcctcccgagtagctgggactacaggcacatgccaccacgccaggctaatttttgtatttttagtagagatggagtttcaccatgctggccaggctggtctcgacctcctgacctcaggtgatctacccacctcggcctcccaaagtgattgggattacaggcgggagccaccgggccccgcctcaagtggttcttttcctggattgaaagcaagctaaactttggggttcccccaagcaagtccttattcttccccttctctatcttttttgtttttttctccatttcccccagaacccggtgttttcatgcttagggatcttgtccttctcttaggaagatgttagcgcattcatactgagtgttccattaccctttccagataacatcttgtattcttaaagcggctgtctggagagggaaagatgcctgattatctaatcatagggttccaagtgcagaagcattctggtcagcctggtgcagctgtggttagtttagatgcttattattattagttcggatagttatccagcgccagtttgaaataattaaggctgaaagtaaaagtgtatgcaatggaagtttttacatagttgaggtaagcagtgtctttgcaagtattggttgaagttataataattggtaaaattagaaggaatcgtgagattaagatgataggacaataaacgtattacttttatttggagttgtgccaatgttttggctcctaagaacaacggattacttctctcctttaaaagttctttcctcctgtccccccagagaataaattatttttaaaaacaaacagtgggaccaaacaacctagatttgaatgccaattctacttcatactgactgtataactttggtaatttcctaacctctctgaacttctatctcatcatctctcacagtgggttaaatgaaattgcgtatgataaaatacttagcactatgcagttcaccttctaggtagctgctcactaagccctagttcccttctctgaaagccaggcaggcggagatttagctggcctggcctgggcctgtggccagctgttgtgcttgaggtctttattaataggtcactcattactgttgctgcagcagcactctgaacttgggttctgattgattcctgaattactgagaactgttccaaaaaaaatcactttgccctttggcaatgtaaacttaatgacacttgctggtgcagcctaggcagattatttcaggaataccagacattttttattctgttgtagctcagactcaacagctttttcttggcagaaaaggctacatttgctggagttcagactgaagattggggccagttcatgcacatctgtgacataattaacactacccaggatgggtgagtacagcatggtttccatgtatttgcctctgacaagaagcatcagaactacagcacgttttctcttgcaaatatttcggttttgttgttgaaagagtgttttcatcattcattaggcaccctctatcttttgaagacttgtcaggttgaaatattggggcagctgcttgcttcaacatgtggagtatccataaatccactataatttttctcctcttggcagtttctttaatagtttcaaattttgtcactgtgaagctcaaattccttccttctaaaagattgaaaaaggccgggcgcagtggctcacgcctgtaatcccagcactttgggaggccgaggcgggcggatcatgaggtcgggagatggagaccatcctggctaacacgttgaaaccccatctctactaaaaaatacaaaaaaaattagccaggcatggtggcgggtgcctgtagtaccagctacttgggaggctgaggcaggagaatggcgtgagcctgggaggtggagcttgcagtgagcagagatcatgccactgcactccagcctgggtaacaaagcaagactctatctcaaaaaaaaaaaaaaaaaaaaaattgaaaaagagagattgtgtccttctttaggaatatctccagctcccagtgccagtatttgatgaaaccatcaaatattatcaagaagctggttgactcccggtggtgacctatttctgagcaattatttctagtaaccaggaaacaatctagcagtcttttttcctccctgtcccaggacaatttttttccttctgaatgtcaactcacccatgtttaagctgtattcttatagcatgtgctatcgtttgttcttaaacttcttaaactttcgagaatcgaagttataagaaaaaagtcattaagaagagcaaactggtttgcttgtagtcaattacaagttattctaaggaacacaattctggtaattttcctgggcatattaaagtgataactggcagtaaaagagatttagtctagcttatgttgataaagaaaacatcaaacttaattattgattataaataaatggaaagcgcttatggttagtacttttaagtgtgtatggtttttttcctataatcctatttaccatgtttagttcctctgggaacattttcattgataataccaattcattgataatacaaaaagagaatcttaaagtaaatttggacccttataaacagtcctttctttgtaacataaaattgtggcgtattggcagctgacctagtttgttgtaattcctgttacatccccttgtctatagggtgctcaggaaatactaatagttttaataaaaatggtaacattcattgtttcggaagttgcatttcctataagttggttctgtgcattgatagagggatacaggaatgagtgcatttcatgggtagtactttctaggtaatagtcttgtacgaaaatattttatttgattctcataaggggttaggtggtattgtctgcctgtatgcgtgaagaaatttaggttcaagaagttaagtcattcgcatagggtcccacagtagaaccaaggccttagttttctgctccttagccattcctctctccaaatgcatgttgcttttcagagagactgcttgttttcagcaatgcctaaattggtgatttcagtgtatttattgctataggccaaaagatgcagtgaaagctttgaagaaaaggatttccaaaaactacaatcataaagaaatccaacttaccttgtcagtaagtactttaattttataattaagactcgaggatttctcaagctatagttacatttttaatcctgggtaaaaaataagaagcaagtattctgagaaaactaataggttagctaggagttgtgtacagtatgacttaaaactcttcatttatgagaattgcagaataaagaaagtttagttgtttataatagcatttaatagcatttaatttcatggaaggagcttgttcctgaaaaatcaatttttcttggtcaggagataggaattagtggttaacatgtattacacatggtgaactgatcaagaagtttgtgtagtggctgggtgtggtggctcctgcctataatcctagcactttgggaggccgaggtgggatgatcgcttgagcccaggagtttgagaacagcctgggcaagatggtgagagcccgtctctacaaaatgtttaaaaattagccagatgtggtggcctgcatctgtagtcccagccacttaggaggctgaggcaggacaatcacttgagcccaggaattcaagatggcaacgagctatgatcatgccactgcaactcagcctgagtgataaagagaaacctcaactcttaaaaaaaaagtttgtggctgggtacggtggctcacacctgtaatcccagcacttcgggaggccgaggcaggtggatcacctgaggtcagaagttcgagaccagcctgaccaatatggtgaaaccccgtctctactaaaaatacaaaaagtagcagggcgtggtggcgtgtgcctgtagtcccagctacttgggagtctgagacaggagaattgcctgaacctgggaggtggagattgcggtgagtcgagatcgcaccactgtcctccagtcctccagcttgagcaacagagcaagactccttctcaaaaaaaaaaaaaaaaagtttgtgcatgtattaattaaccataatttaagatgaggagaattgaaattttgaaaaatacctccctgtaagctttctgccttacttgaacagctttgtggaatcctgagatgctctcagctcattaaattccaaacaagttctgctgcctggcgtgatttggagaatgttctatgttggtttaagcaattctcctgtgtgttgtattgtctgtgatttaagtgtggactcttatttgatgtgttcccattttcccaccatccttggcaatatgacctcttcagtcacgttggtgagttgtcctttttactttagtatgtgttgcaagccctgcctgctgcctgagagtgagctgtgtagctttctgatttattctgcacgcctttgtttatctcagcccagcccaagactgtgcatggtcacggcactaatcagccaacatcacgctgcgttaggagcattagtctttatcaagaggactttggggcatatgtgagcatagctcctggtttctagttacatgaagaagaaaatggacatcttgcataggctcgctgaataagcagaaatgctgtgaacggtcttcatgatttgatcattaaagaaacccttcacattgggatctgaatatagttttagaggcattttcccccttcaccttttttttttttttttgacctcttacctgtccttaactcttgaaggtcacagaatggagaagacgggagagaggagtgaggcacttctgtagaaatcccagaatgatgggtcactgatagaaatgcctggcacctgaccaatgctcttgacaaccctgtgaagtagttctattattaactccatttaacagatgaagaaattgagactaacagaaacagatttatttccgagatgaaaatggctattacatagcataggcaagatttgatcccagtcctcagattctaaattccatgcccttgcctcatgccactttgtttctaagaacgaatcaagcctcttaaaagagtaggctactgtgtttcctttatgtctttagtttcttcctgtgtagtacagggccaggtatatcagatgttgactggattaatgattaagcaccccaccctcatacacacacctaatcccgtctctcctagtatccgggaagactcaagggctaatggaaggtactgtagaaccggagtagaaagatgtgtagatgtaccctcaaatatagtatatctgggatatctcaagggtgccaaaggttaggagaattgagtaaggaagagaagggcagaagatgaatttatgcccccttctctatttcagcatggggtattattattttgctttttacaggtgttcaccattcataacaatttgccgctttctccattgtgcccagcctacttgatgtttcagtggttgcttcttaatcccacctccatatcttcttccatcatggttccctccctgtgacgacggaccagggaccctccttgaggaagttgggctattccagagtgttgtgcctctggccctctgtttctctttgggcttccactcttccttctcatcaggtagtctaatctgctcgctgcctttcccattatctgttccacctcagatctgtagctcccttacctcgtggtttctgtccaatctaaagcctgtgcctaaaaacaggcaagagtcacaagtcataggtcagaatacaccttcatccttggggtcacagtacattaaagtcaggaaaaacatctggcttttccttggattttctttaaataggcctttgactcttcatatcttcatgctgatttccctgagttgtgtatttaatggtctagtcacctcgtctcagactactcactgccttgcagaggtatgcttaaggcctcagaactgactttaatattcacgtaagccaaatttaattatgagggaaattagtcacaggagtcacctatgtctgtcaaaagcaattataagtttaccagtaaactctttaaaatgtaatccctatatatgacatttccattttattaatgtaaagtgatgagagcctgtcaaattcgattataaatattctttatgttatctgtcatgttgagttctccgtggacgtgttagccttgattgggctttgacggaacctgactgtactatgatttcctaccatcagtcggtggagcagttttgttttgtgtttcagcagaattttgttaccaggctttattactctgagccagagagtattctgttcttgaatgagtcaattgtgataaatctcagcaagaggctactattattgtcaaatggaaagtggtcgaacaggttcctgagaatcaattagttaataggcctttgtggagcaccccctaagcagtgagcttcaggggtttcataaaatgtgtaaaatgtggttgaaaataataatgaagaaaaagcttggtttattctcctttggcaaatttaccagtgaaacaaaatatcaggctgggtgcagtggctcatgcctgtaatcccagcactttgggaggccgaggagggtagatcacttcaggtcaggagttagagaccagcctgggcaacatggtaataccctgtctctactgaaaatacaaaaactagccagtcatggtggcatgtgactgtaatcccagctactcgggaggctgaggcaggaaaattgcttgaacccaggaggcggaggttgcagtgagcctagattgtgccagtgcactccagcctgggtgacaaagcgagactctgtatccaagcaaaacaaagcaaaacaaaaccatgtggttgtccccccaggagcttgttgcagttggagggagtgagaagactgaggcctgtcctaggggtgtcatcatagagtggggtagtcaccttggtgtaggcactattcacggcccaggtgtagctctgatggccctgaaacctggttgttgtcactctgcctggtttggaaatttacagtgagaaaactgtcaactacctctttttcttccagccctctcttaaaatacttagatcagctaatcatcacattcactcctgctaggaagttctccatggaagatgatctaaatagttgccatgtattgaggtcctgctttgtggcaggctctttgttatgtttcatttgggccttacaacaagtctctagagggagatattatgtccattttgcagataaggacactgaagcttaggataagtgatttgcccagccaagcccaaaagatcagtgaagcctggagtcacccacttcagtctttgttccttggctcctgagttttcaatcccacctcagattatggattcttatttgtcttatttcgaaagatgggttatctgaacacatttgcatcaaagttcaatttcagaatatgtgaaaacatatttaatttttccaatttgccacgtaggttttattacttatctgagtgagttggagggtgaaagaggttctggtgacataatagaggaggtgatgtagaattaattagtcctgacattcttgattctaatgggaaaacacaaaaggcatgactgctaatctccagatgttcacatttttagcatttcatgttgactctttgattttgtgcatgtacctcctgggagtcttacccattatcataaaatcttgtggcaccaaagataaaaattagtttgtgagggccaggtgcagtggttcatgcctgtaatcccagcactttgggaggccggggtggatggatcacttgaggctaggagtttgagaccagcctggccagtatggcgaaaacccatgtctactaaaaatacaaaaattagctgggcatggtggtgcacgcctgtaatctcagctacttgggaagccgaggcatgagaatcacctgaaccggagaggcagaggttgcagtgagtcgagattgcgccactgcactccagcctaggtgacagagtgagaccctgtctcaaacaaacaaacaaacaaaaattggtttgcgaattatttagcaagaaatacacctagggagagtgagacttggaggctaggtatttgcgtaagacggtacaactagttaggtgaaatatttctgtaaactcacattgagctagaagcacttttccttttaggatttcgcccgttaaaaattcattataataatccatcaagctaaatggcatgttattcaactttccaactttgtctcaccaaactgtacagattcatcttaatatgttttggattttgtttttatttttctttgccttaaaggttttccctgtgtttcacacagctgcatgtttctatattttctgattatttcttggtcacagtgccttaaaactatagcgttttaagtataacttaaacgctatatgctgccgctttatgtattgccattaaagagagactaaaaatacaaagcatggcatgaagtccattttcagggcttctattctgcagagatgattatacctatcctggtcatgctatggtttctatgacctttctaatttgaggtggtagcatggaaactaaagatttaattttgtttttagtttacttttagaaatctacttcctgcatgcagttcttcagtattggttcattctttcttagtcaagtttctgctcatgttgctttattgcaaatgtgtttttcaagggaactgatgttcctcagaccatcttcttaactgtataacaccccatcctccaggaaacttttcttttgactttaccaaaggggtgccttatgtattcctgattttgtgcttcattttctgtcagttactctttgattgccttccttggattttcgttggcccgtatagtaggtgaaccccagtgtttcagcccttcctcttctcttctcattgtaggcagccttgatgactcacttttggcccttcactctcttgaactatagctgtgtgtgtccagctcactgctaaacacctacttaaatgccccttatcttttgaactcaaaatatctaaatttcagcccatcatttttacacctagaccagccataccaccccctcttccaaatttccgtcacaggggtcctcatgcagaatgagagtcacttaactttcagtcatcttccttttttgaccagcactgtcattcaaagttcttccttcataatggtgtcatgactcctccttttcttgtacccacatcatcttagtttaggccttttctataacatgcctgaaatagtgcattgctactggatctttctatcattccaggtttcttctccctccgcttgcctttgcagagtgctgcctgacaacctatccagaatattactttgcacacattaaccttttcctcaatttcagggtacaggtgtgatggtgacaaactaacagagaccctccataacttcatagtgccttcaagataatatccacaccctttgcatgccacacaaacttctctacaacctggacggactttatccaccctatctttccagtgtccccaatttacctatatcaggatgcctctactagagacagaccagaatacttatctcccccttcataacttacccatttttccacatttatatatttttcatacaatttatctgtctagaatatagctctatactcatttttactgttcttagccattttgcaaagcccagcttccagttagccttttccaaaagtcttgtaagaccacctagccctaaataatcactcttgcctataagggcctatagctggggtgactgtgtaatttatcatccaaaccaggacatttttgaaagtgaaagggtgtgtcatcattaataaacaggacattgggaatatacctgtgctaccctgggtaaactgggacagatattattccatccatagctcatatgtttggcctgcacgtcccttcagcatttagcatttagtactctgcattggtgttaatgcccttctggatgtgctgggactcctcaataagtctgtcctccagactgttacattatgctcatacttccacatatccccagaacctaacattttgccatatattttagtagatactaaattatgtttgttaattaggatgctgatggaacccattatttagcagtttttcccttacatttttaggaggtggttttgccagataaatataatgtttaattttttttctaatttagcttattgacatgtgtgtgcagaactgtggtccaagtttccagtctctgattgtgaagaaggaatttgttaaagagaatttagttaagctactgaatcccagatacaacttgccattagacattcagaatagaatcttgaatttcattaaggtaagtctgttgtatacctcatgggatggtaaatttctaagattagggatttaatagcttacctcctgattgtttcacttatcttttatatatctaggattgagctagaaaagcatttttgctattttagtttctgtgtaataataattttttggcattggatggtgccctttttctgaagaatttgtagtcatttccctgctttcctctcagtttctattttatctgtgtcaaataggaaagacagtgatctgtgtgttcactttgcaggtagggaaacttccagctaactgactagttcaaggttacttggaaaaagagctactgatgttattttagaatctattaattttggattcagagcagcaaaaaacaattgatagtatatatcctagggtttcttcaagattttgaggcatggaaatctgatttaaaagattttatattttcctagcctttgaaaatgagcattttgcccatggcattcaaaagtagctttctctttctgagtggggtacataattattgatctcttattttctatcaggagcttaagaattgtgttttcggctgggtgcggtggctcacgcctgtaatcccagcactttgggaggccgaggtgggcagatcacaaggtcaggagttcgagagcagcctggccaacatagtgaaaccccgtctctactaaaaaatacaaaaagtaagccaggcgtggtggcgggcgcctgtaatcccagctactcaggaggctgaggcaggagaatcgcttgaacccaggaggcggagattgcaatgagcagagattgtgccattgcactccagcccgggcaatagtgtgagactctgtctcaaaaaaaaaaaaaaaaaaaagaattgtgttttggttttgttgctgttttaactctggaacttttttcatctcttgaattcagacttggtcacagggcttcccaggaggtgtggatgtaagcgaagtcaaagaagtatacctcgacctggttaagaaaggcgttcagtttcctccctcagaagcagaggctgaaacagcaagacaagaggtaggaggcctttctttgacccatggagactatagtagtgtatcacttgggtcttttctcattacaggagacaaccctaaatccacccagcttaagcaaaaagatgaagttattagaaggatattgcaatatctcatagaataaccgagacttgggattttgctacttaaagtgtgttttgctactaaaagtatgaaagtttgtttggcatgttccaccctagactaatcagaacctccctttttacaagatttccaggtgttttctctgcacattaatgttgagaagcactggcctagagccttgagctttcacctctccacccaaggttggagatgtggcattgacccaaggagggtcattgatggagaaggagatgccttgtcagctgtggcttaaaaggacttgacatgaattgagctaccatttgttattaacaacccaaagagaaggcatcaataatctcacatggcagtttatcacttagacccttggttaaaaaaaaaaaaaaaagggcattttattaaattgtaaatgataatcctaatagccaccttttgttgaatacctgctttattatgggcatgtcatttgcttagcattcttcacaaaatgctggacgggttgtgtagctgatgatttactctgggcagataccctgtacacaggactttgagagtgcttgagttagctgaatggaaaaaacttggcgttgggtggctatgttaattcacataataatattaccatgtttcatactcatagactgctcaaatctcatcaaatcctccaacatctgtccctactgcaccagctctttcttctgtaattgctccaaagaactcgactgttacattggtcccagaacaggtaacaacaacaatcattgcatttaattgatgtcttttcctgatttgtaagcaccttatatacagtttgtcttttctggttaacaacattgagatgtaggtacactcatttcacagaggaagagactgaggcttagtaatactatgtgacttaccatagttcagttccaagaaggagtaatcccatgggttctgtctgcttccaaagcccaactttgtaagagttgtgcttgcctagcggctttcatggctttctggagccttgactgtggactggatctagggtccatcagctaattcctgttacttctggtaggactgtcacatatttcagagagtttagtaaatggtagtcttattacttgtatttattatgccaactgaattgtatttacttctttgtgtatatcagtttatccaaggtaccgataaacaattattatatgaggctaatttccgttctgctgtaaaggaactataattgaagattttgttgtattatttttttcttatataaaaatgcatgtgactaattcctcttagaatttaatacaggaagaaaaggtgtttctttattccttcttctttaataccatgagaactggataaccctcatttgtttttcttttaccctattggttgccaagaaactcaggataacttttgccattttatccaggtttctggtaccttcttctgctaggtacctggtacttctcccctctccatattgggttctaatctttttttttcctttcatttttaaaattcctaaagcatattttggggtttattacaagagatctcaagtccttttagaaggtgacaaggtatacatttgtaaaataactatatgtatatttatatgaaattaaatttaagtttgaaaatattaaattttgcaaaagcattttttcatccagcaaatgtcccatgggggcaggaaacaaggtagttattctttgtgtgtcgcactgactggtgattgtgttgctctctacagattggaaaactgcacagtgaattggatatggtgaaaatgaatgtgcgagtgatgtccgccatattgatggagaatactcctgggtctgaaaaccatgaagacatagagcttctgcaggtgttgtacgatttcagggactatcagtcaaagtgtctcttaaagttattctctaaactttgagtttggagatggaagacaccttaatattgtctagtacatcctcctacatcctgatttcagttgatttctaaacttaacaaaaatatccaagaatgactttgtcagaaatgcagtagtaacttagacatggtttttagcctcttgcaacaaataatttattataagttataaccttggtcatgtacaatcaattctctagttgttttaagtatgtaaaaattgcctctattttcatccactcaacaaacattgagtaactgtgatataggaagggatgtagaaatgagaaggaggctattctagtccttaagagtttatgcctaatgagcaagattggtttgtaaacaacaaacataatgaagtattatagatactgtagtataaatttgttcagtatatggtgggatcatgggtggggagaaggagagatgtgaggtttttaagaatggtctagatggaggcaatgctcgagctatagaggaacaagtagacagggcatttagacctgcatgagtagttctacagccctcctatgccttctgctatgtctgtgtatacatatactttatttttccctctaccagtttgctcttctaattattttaaattttaaaacttattaattttagaagcagttagaaaaaaaaatcagtttctagtttctaagtccctttgttgccaagttaagaagcttaagatatttttacttttctcagattcccactcgccacctctcatgttatttttcctttaacttcttagattgttagtaaataactttttccttgctcatttcttatttgggaaacaaaaaaattgtaaaaattttcccaacaatgtttcttagatatcactgctgtcgtgaatagtttgttttttccttgctgcagtacacccatgttggtaaactttggtgcaaactttgagtgcttgcatatccaaaaatgtcctctgattgtcatgttaaatgcaggttagtttagctagatataaaattctaggcacaaaattctaggcctttgaagatactgcttcactgttctcttacacccactaatgctgatagaagtattatattattctgcttcttaatcctttgattaataatatttttttctagttgcatttgttatttttctacgttaatatttcagaaattgtactgttccctctgaagagatatatgtacatgtgtgcagatgtttgtttaacttacttatcttccttagtagatgataggcttttttgccttatcaacttatgtgtatttttaattctaggaattctcagctcctactttaaatattgactttctaccattctttctattctcttcttatggaactttaagacgatgaaacttccagttggattcatttgtctcttaacatttcttttatacttttcatttcttcattctaagttctgggataatttctctgtttaatgtatttctctaaaacttgtaattgagttgcttattcagtccttctaataaatgtttcaacaatttctttctattaaaaatatgtactttaaacatatttactatatacaaatatgtacataattttaaaatatttttaaaatatgttggatttttataacagttctttcatttcatggttctgcttttctttatctttccaaggataataattatatttaacgctgcttttttgtttgttctgtggactctcctttgcaaattttttgttcattttttaatttgcattctccagtgttcagctggattgctgatagtgagctcatttttgtgtgagactctctgccagctggtctgcattctctgctgacccagctcacccatgctgaagggaggatgtaattgctactgctgtgcttgataatattttcagagtatggtatagcaacatgggatgatgctgtttgggatccatttatggatggtcttctggattatgtattctctatttttttcctgaatgctactagtgcctagaaataataccctatccctctgtcccaatcattgtttccacctggaaacattactcctttctcagctatctggtctcaaatgagagaaggggcatgagcaggggttgtctttcctggttatttcactgccgtacctcaaccaatctgttagagccccttgtgcttcttggcttctggcttttaggcatggagcacccttcatattccttccatgttctaggcagtactcactgtgggcaaccttgaatgtcctgaattgtgctgtcctctaatttaagagttagcaaactgtggcctatgggccaaatctgggccttgctctcttttatgctgtctccaggctcagaaggctttttaaagggttgtttaaaaaataataaaaacaaacaaaacagctagaggtcatttctcctatatccatgcaaacctatacccagagacccctgggaactcagatattcctcttaaggaactcattgccatgccccaccccactgttaatggatatgagtttgtggtatcgctcaggtgtgtagggatgagaagaggatttaaaccacaacgtgggagtataaaattccaggtgaggtaagagctgacctgtacaagtaatggagtatcatgccatgccaaagagtgggcttaaccagactggcagaggggagctgttgaaaggatataagctgaggggctacataaccaggtcagattttagaaaaatcctctggtggtgttgtgatgacagattctcaggaagcaagacaagactctagaaaacaacttaagagagtatttctcattggttgtatgctgtgttctgtgggtagaaagtggcatctttggtcaaataagtttgtaaaaccaattgtctactgtatttctcctcttggagatgcataaagttcactgatacagctaagagtctttgtttaacccaacatttataaacttatttatccaaagaatcccaatttgccaaatatctgctaatattctgcagaacatcagggtagtataccttgagaaatgaatcagtattttggatccgtggctttaagtatattatttttggaatatcttagaattgtaacattttgctaaggatccttggggttcttgaccttaggcaagtcatttactatcactggacttagtttatgtataaaatgaagagcttagatgacagtaagcaagagtaatattaaatatatcctctttatgtgggatgtaaaaaggaaaattcatcattaaatagatttcaaaggtagtagtccacaatggcggcttttccagatataaactttttaacttatgatgttaacacgtgtgttaaactaaaattgaaaaattaaatatcaaagtaaacggatatgtggcagataatattttttaaatagccacagcaatatttctagttccacctggtcttcctgggcctttcagagctctaaaatgaaatgatttatgactttttctctcatattctcatccatctgtggcaaacaatccttcagtaaaaacacactgaaacatttcatttaaatatgtgaatccagttttatattttattccaatctgaagtgctttgtctcagggtgtttgggtgcagatgtttggttgaatttttcaaggataatgctaatttgttggttgctgttttaatgccagagctcagggctgtgttttgccttgaatagtaaagagtcttaggttataaatcaacatgagaatactactcatggccaaattcaaattgaataggttctggcaggggatcaacttgtttatagagactgttgaatgtggaatgttatttttctttgtatactttttgttagtgacatataaagatctggtgtggggagtgctattcttaatttcttttgacaaataattttttttttacatctaaataactccactatggttgatctgaaataaatcaattaagtcttctatggagaaaaaggacaagaagcatatctgatttaagaatttcagaatgaagtcagcaaagatagactgtggggaaatagagaattctttttttggtgtttttggttttggttttttattgatttatttatttatttatttattttatttattcattttttccccctctaaccctatgtcataaacaaagaattctttagggtgtattttttcaaaggtttctcatacccatctgaaggagtcacgtcaatacagttagaacgcccagataatactggctccctggttggctgcccccttataactgcaggggcttttggaggcttcagcataagcctagggagtcatcagcagggtggcacccaccttgggggtcagtgagggcccacgggcatactctgatggaaggagtacaactgtaaagaaggaataaaagtatctgaaatcagctatatgaattgtaaaacaggcatttttctccccaaaccaaccaatattcacaatttttttttagcttgccaaaatttacatcctctttcttccccaaatcccattgaaatgacagaagaaatatgaaaataaaaataaaccccaaggattacagaaaaggctaaactgaccatcaggcctccagaacagtgagactattcagtgcctgataaagcaggtgggatcagaccagctcagagctcacagccccacccaggtgaaagagacccctccaaaggacttttcccagaagcaacccatactaacctcaaaatcagagcaagaatgaataggccttgggcactcacatggtaaggaaaacaactgtcctctgtcctctgctgtctgagccgctaagtcaggagcagggaacttccagggtggctgtcaaggccagaaaaaaggactctcctccaaataactgctggtttccaaaagaatctaggaatctctgcagttagaagaaaaataatcagcactcattaggattttttaaactttgaaggcaggcagcctcatccctagagaggaggatgtagtaaggctgttagatttctcaggaaaattatgtattttcactctctccaccaagaaccgacgctgacatgatttggcttgccatctcgctttgtggggctgaggtttttctgattcactgactttcatagggcgtagtcatgcaggggttccacctgagtatagaaggggtttttgctccagctccccatcttgtttgcaccccgggctttgtcctttgcgtctgctgagaactctactggagattggcagatgggtgccttgtgaaccattgtttctttattgctgcttgagtctttagatcttatttggttttgagcctttgaggatttctcatgctttcttgaaagtgtaggcacaaatgttaaaatatttttaatatctagcatttttaggtattttgttatgagaaaggttttcaggatattgagtacagtgctgtgcaaaaaatacaaattctatatagcattttttaaattgaggcaaaaaattaaccattattttaaattatcacataaaattaaccattttaaagggtacaattaagtggcatttatatacattcagggcccggcgtggtggctcacatctgtaatcccagcactttgagaggccaaggcgggtggatcacttgaggtcaggagctcgagaccagcctggccaacatgtgaaactttgtctctactaaaaatacaaaattaaccggacatggtggtgggcgcctataatcccagctactcaggagactgaggcacgagaatggcttgaacccggaggttgcagtgagcagagattgtgccactgcactccagcctcggtaacagagggagactccatctcaaaaaataaaaataaaataaaataaatatacattcattgtaactacagttaacccttgaacaacacatagcagttatgagcactgaccccacagtgtagttgaaaattcatgtataacttttgattttcccaaaacttagctactaatagcctactgttgaccagaaaccctatcaataacataaacagtcgattcacacatattatgtatgttatatatgttatgtgctgtattcttaaagtaagctagagaaaagaaaatgttattaagaaaattgtaggctgggcacagtggcttatgcctgtaatcccagcactttgggaggccgaggcaggcggatcatgaggtcaggaggtggagaccatcctggctaatacagtgaaaccccatctctactaaaaaatacaaaaaattagccaggtatggtggtgggcgcctgtagtcccaactacttgggaggctgaggcagtagaatggtgtgaacccaggaggcggagcttgcagtgagccgagatcaagccactgcactccagcctgggcaacagagcgaggctgtctcaaaaaaataaacaaaaaaagaaaattgtaaggaaggctaggcacagtggcttacacctgtaatcctagcactctgggaagctgaggcaggaggattgcttgcatccagaagtttgagaccagcctgggcaacatagtgagactctgttgctacaaaaaataaattagccaggcatggtggtacatgcctgtggtcccagctactggggaggctgaggtgggaggatcgcttgaacctgggaggtcgaggctgcagtaaaccgtgattgcaccattgttgggcaacagagtgagaccctgtctcagtttaaaaattaaaaaagaaaaatttctttaagaaaattataaggaagagaacatatatttactattcattaagtggacgtgggtcataaaggtcttgatctttatctttttgctgaatgggctgagaaggaagaagaagagaaattgatctttctgtcttgggtggcagagtcagaaaacaatccacctctcagtggagccatgcagttcaaacccatgttgttcaaggttcaacagtatttcctctatttaattccaatacattttcattaccccaaaaggaaaccccatgctcattaagcagcctctcctttctgcctttcatcagttccagataaccaccaatctggttctgtgtctgtggatttacctgttctggacatttcatataggtggaatcacataatatatgactttttgtgtttagcatctttcacttagtgtttttgaggttcatccatgttgtagcatgtatcagaattttattactttaatggcctaatatttcattgtatatcccacgttttatatatcagttcattaatagacatttaggttgtttccacctttggctattgtgactaatgctgctatgaacattcacatacaggtttttctttgaatacctgtgttcacttcttttgagtatcaacctaagagtagaattgctgggtcgtatagtaactttaactttttgaggaattgtcaaaatgttttgcacaatggctgcaccattgtatattctgttagcggtatgcagtactactaggattccagattctccacaatgaatacttgttattttccattgtgttttttttaatggcccgctggtaggtgtgaagtggtatctcattatggttttgattttgatttgtatttgcattttcctaatgactaatgaatttgagtgtctgtattatagttttttattttttaaattaattattttatttatttatttttttgagatggagtcttgctctgtcacccaggctggagtgcagtggcgcgatctcggctcactgcaacctctgcctcctggatttgagcaattctcctgtctcagcctccggagtagctgagactataggtgcctgccaccatgcctggctaatttttgtatttttagtagatacagggtttcaccatgttggccaggctggtctcaaacttctgacctcaggtgatctacctgccttggcctcccaaagttgtattatagctttttaaaaggtaattagccaggcatggtggcaggtgcctgtaatcccagctactcaggaggttgaggcagtgagctgcctgggagcttgaacctgggaggtggaggttgcagtgagctaagattgcaccaccgtactccagcctggcgatactacttgtcaaaaaataaaataaaataaataaaataaaatgtaaaccagatcgtgttgttccttgctggaaaccctccattggcttcccattatagttggagtaaaactagacctctctagtctggccacagagcccttctcggtcgtctttagcctacttctgtttccgtggcacgtgcttgctaacctccttcctattccttgagtgcactgagttcattcttgctggggagttgtttcatccctgactcttatgcttccctgtcttcaaatggccagctttttctttttcttttcttttcttttttcttttttttttttttgagatagagtctgactctgtcactcaggctggagtgcagtggcacgatctctgctcactgcaacctccgcctcccatgttcaagtgattctcctgcctcagcctcccgagtagctgggactacaggtgcccgccaccatgcccagctattttttgtatttttggtagagatggggtttcactatgttgtccaggctgatctcgaactctttcttatcattctgatcttagcatgttactctcctgagaagtcttctgtgactccccagtctaaaattagccaccgtcctatcacatcaccatttattcacctggcactcacagtgtctgacgcttttcttgcatggtcgtcagctgtctttgcctactagaatggaaatgccaaaaggcttgtcttgttcattaccaggttctggctcccagattagtgcctaacatgatgtaatcattcagtaaacaggcttaatgaatcaatagctttcttcccctggattttatgtgacttaaaattcaaatctgtattcttggtatgagatggggactttaccttcatttattttttcaatttgatggctggttgtccaaataacatccattaacaattcacgccttctccaatggttttaaatgcccctttatcacatacggtatattctaattcagggttgtcttctagaggctattctcgaggctattctcgtcccttgacctatttgtgcctaacttggcatcatactattttcattactctaaagatgtgtttttatgctttctagggtatattagcaaagagatgacatacttcatttgggtaatttgaagaaagcttaatcaaaatactgtttatttagtaagatgttataaagttcagggaaactacaagggcttgatcgctaccctggattattaactaatatccctagaattacatagacaagaagagggcacttttgccagaacctagaggaaagaataatgtgggggagggcagacttgaaagcaggggtgcctttggtggaaggagtggaaagaataaatatccagacctcattctccttccttcctcctgtttcctgccagccagcatgcctgttggctgaacacagaagcaagaagacaggggatctggcgatgtgatccctacaagccaggccccagggcacagagttaaggcagaaagtatggacagtggatctggagggccaaggaaagttctccagcagaaaggaagagcctccactcaaaaatttcttggctgctcttgcacatatacttcaccagtgaccacagtcttatagtatcagtttattataaaaccatcctgaggccagatgcgatggagcacgcctgtaatctcagcactttgggaggccaaggtgggcagatcacctgaggtcaggagttcgagaccagcctggccaacatggtgaaaccccgtctctactaaaaatacaaatatcagctgggcgtggtggcacgctcctatagtcgcagtcactcaggaggttgaggcatgagaatcgcttgaacccgggaggcaaagttgcagtgagctgagatggcaccactgcactccagcctgggtgacagatcgagactccctctcaaacaaaaaacaacaacaaaaaaaaaagcagcctgtatacttggaagttcttcctgttttggctgtttatacttaccttctagtaactgttctgtttctttggaacctattccttgtctgttttctttcatttgaaatccagtatatttacttggaatcccctttctgttccaccaacccacactgaacaattagatcctgaagccctactaactaagagggtcttgctctttgttagactcttaggcagtaaaaccattttgtgcagtagacacatttccccaccactgtgttgcttgtaaactttgaacttttcattagggatgaggactggattttctttagttttctgaagtggaacgtgatgattctgagactctatccagtctaacaagtgttgtgatgagttaaaggcagccaccttggccataggaatgaagagttgcaacatgtgttttgtgtatttgctttcttggtgttatgtactcagctttgggccaccttcctcttatcttgaatagctgacttgtcctggtacctcccactttaatctttttgtttgtttgtttgtttgtttttgcctagcaccagtaagacaagaagagaatgctctagtatttagaataaagggagctcagattttgaaatgacaactacagaaagccttactctaacttactggagaaatttaaaatcaagggaatctgaaatttgatcctatgaggattgtaaccagttgaaaaaaaaaaaaaatcctgagaataggaaaaagaaagccatcctcccagaccattcttgtctttaccattcagaaatgtgtaagatattaagagtagaaaggactgtcagcatctttgagtccatctccctttctttgcagttgaggctgcatatgcagaaagaataattgcccacaccatgacaagtggtggagctggaaggagaacttctttctcatgagcttatgttctatccattagaccaactagtttctcattttgaacccaggactgattttctagtatacctggctaacctattgtgttttcatgtgggtacgtgaggcaatttcaaggcagcaaccaagtcctgtactatttgcagacactgttttgttggaaagaagagttggaaggactttaatatgttaatgcttttcttaaggattatgctgacaatttgtcatttgactgaagcctgtataaggaaagagactatatgagcaagttaagttgaaaaatgtttagttttagagtaggtggggagagtatttactttgagcagatagagaaattggggtttcttgcgctttggggaatactgggatgaagaaaatatgttatgggctgataatagggatattgccatacagatagtatttccagagacattttaaagcaaacacatttcttcgtgttttggctctttcaagagagatattcaagcatttttgtgtttctttttattgagttgccctctcttggtcaatgtgggatgactgtagttggaattgaaagtgcagagggatctccttccttaattcctgagtgctctatggaggagtaagagccatctggatatcagaagaggaagctcttaatgagctcctttttgttttgctccaaagacttttgaattgattgttaaattcactttaacttagaagcttgcctttgcttttatatggtataaaaggaggcaattccggggtctccgtgatggacatatgcaccagcagctgttgttctgtattttgacttgctcccctggctccccacatccacagccctgcaagtgcctgctatggggaactctgacctatcccttttgtccatggtgcttgatcttggcttggcttccaggtggcttggccctcctctgagacagacatcaattgcaaagatgagagtgggctggcttttgaagacgtttttcacattctggtttgcagacctgttgagatgtgctactcctttcatgtttccattccatctgtctcttgaaagggcaaagggagtgtcttcatgtgactgagggctgttgatgttggcttcaaattcatttcaaattaatttctacatttttgtcataggtatcagccattgcattcccttgatcttgacattgttctagcaaggctgccagtgagcaacaagaagaccaatttctgtacactctttaaagcaagaacaaaggaaaagttctcattcattacgggggttatattaaatgccattcttaattctttgtagaagattggatcctggataatagcatattacaggattgtattcgttatctagttgagcttctagtgacaccctgtcaagcacccataattcgtttatttactaccgactacctctgtatgccagacactgtggggtttcaatggcaccattgccaattcttacaacaaccttacaagatagctgttctccttgtattatagatggaaaaaaaccaaaaaaaaacaaaacaacaacaacaaaaaaacctcaggctaaattttagccacatttccccaacttccatagcaggcatatatatgggagatgcctttggcacctgagtccaaagttttctctttgcattacaccaggggtatataaaggaaccaaatctagcctgccacctatatctgttttattagaacatggccacacccagttatttatatattttccagggttgcttttacactacagtggcagagttgagcagttgcagcaaagactagatggcccacaaagcagaaaatgtttactatctggagctttaagaacaacactgttgacccctacactatactgttgctgaagatggccctgtggttggcaaataggatggtttttctggccgcatgttgcaagtctaaaatcagaaagtctatcatctgtctgactcacctttttttttctctttatgtcatgttgtcttttcaatattttttgttatgattttttagagggtagtggcttttacctctgagtctaaatgccagttagtaatagtttgatttatttgtttagagatttcctgtcagcagtcttgtaatagattgtttgagattctgaatggtttcatgaagcatacatacatttttcagcaggtctttctttcttgaggggaaaaagtcagccgatgtgattgtgcagtgtttaaggaagttctgttgctttcattttgagagaagcagcatccctgtgttttgcttgatgttaatgtactattacacagacaaaactctagccaaggtgggattggaaatattaatatcagttttatgtaccttgggttaatcgaaggtgtgcctggaaaaaaagtcagttgtaaggcagaagttcttaaatatcagtgtacataagaaacactttggagtgcttgttttaaaaaaatgtagattttcagacacccagcctgaagattctggatcagtaagtctaatgtagatggctctgatgcttatgagaaaaaaaaaaaaatgggtttgggaggttgagtcatggtttaatgcagtatttctaggtagtccaaataagggtattcatgatttgtttgttaatcctgttttagtttgcctcaaaatgtgatataactataaactttaaatgtttaagtacaacgtaacaggaaataaaataatgccactgtaaatgtattttaactacttctgctactgctaataatgcaataacattttatgtttatgctttatagttatagagttcctcattacacacatctcatttgatttttatgtcaacccttgaggtagatgtggcaaggggtataattttcatttatcaatgagaaaactgagatttaaaaaacatgtgtttttttttttttttccccaacatggcacagctaataagcactacatttagaattcccatacaacacttctgggttttagtccagtattattttcaatgtaccatattattcttatgacacctattttgatttttaaaggaaaatataatcagtttatgactcactgccttccaataggaaggataagctgtttatagttaagtactttggtagtgccccacaggctacttaacgtggaggtgactgtaggtatgcgcagattggtgagtcagatgtctttatagaatgttccaagtgtggaagaagaaatctctctcctttctttgacagaaactctataaaacaggtcgggagatgcaggagaggatcatggacctgcttgtggtggtggagaacgaagatgtaactgttgagctaattcaggtgaatgaggatttgaataatgctatccttggatatgagaggtgagcagatcatgtaccctctttacccctcttccatttctactttcaccaccaattactcagcattcttatcagagtgcctacaagtgacccctctttctagattctccattctcaataggaaaggtattggcatgtggggtgggacagttttcccttgtacagctcctactcagtaaatgctagaggtctttctcctagttaaagtgacatttcagcccagcatggtggctcccagctataatctcagcacttttggaggccgaggcaggaggatcacttgagcccaggaattccagaccagccctgacaacatagtaagaccctgtctctacaaaaaataaaaaataaggccggacacggtggctcacacctgtatccccagccctttgggaggccaaggtgggcagatcatttgaggtcaggagttcgaaaccagcctaaccaacatagtgaaaccccatctctactaaaaatacaaaataattagctgggcatggtcgcgcatgcctgtagacccaactactcaggaggctgaggcaggataattgcttgaacctgggaggtggaggttgtggtgagccaagatcatgccactgcacttcagccttggcaatagagtgagactctgtctcaagaatataaataaataaaataaataaataaaaaataaaaaaaattagctgggtgtggtggtcctagtaggtgcttatagcctagctactagagaggctgaggtgggaggatagcttgagaccaggaatttgaggctgtggtgagctatgatcgcatcactgcactccagcctgggtgatggagtgaaatcccacctctaaaagaaataataataaaatgacatgttaagacacccttaggggcagtgtttctgttgagaattactgggaatctctacttgcacagtgaccgtatttctaatcagctgataaagaatgagaccagtatgacataagggaaagaggtgaacaggcctggattcaaatctagctgatgattttggataagttgcataacttttctaagatttaagtttttttctttcttatttttttgatgtattaaataggataataatacctttttagagggttgggctttttttgaggattaaatgagataatacatatgaaaacacctagcagagtgctagcacattgacatccattaaatagtaatttcttctcttcctctgcaccggtgtcccatttaacctttacatttattgactaggtttttcttcccacttatcatgagtgaattaagagaaaccatgaaataaagccagtatttatgggccaagaatggtggtgcacacctgtaatcccagcaccttgggaggctgaggtgggcggattacttgagctcaggaagtttgagaccagcctgggcaacatggtgaaaccccatctctatcaaaaaattacaaaaattagccaggcatggtgacacacgcctttagtcccagctacttaggaggctgaggtgggagcatctcttgagcccaggaggcagaagttgcagtgatccaagatcgtgccactgcactccagcctgggtgacagagtgagaccctgtctcaaaaaagagaaacataaaaccagtagctattaaatggtagtttctttccttcactgtctcatatttactgtcagagaagggcatcgactgaagatgtaagcctaggaaccatgcttgctttctttctttctttttcttttttcttcgttttttttttgtttgtttgtttgtttgtttttttgagatggagtgcttaggctggagtgcagtggcacgatcttggctcactgcaacctccaccttctgggttcaggcgattctcctgcctcagcctgtagcaggacgagccgcagacaaaactcctcagacactgagttaaagaaggaaggggtttattcggccaggggcattggcaagactcctgtatcaagagccgagctccccgagtgagcaattcctgtccgttttaagggctcacaactctaagggggtgcgtgtgagagggtcgtgattgattgagcaagcagggagtatgtgactagaggctgcatgcactggtaattagatcggaacaaaacaggatagggattttcacagtgcttttctctacaatgtctgtaatctatagataacataactgattaggtcaggggtcgatctttaactaccaggcctagggtgtggcgccgggctgtctgcttgtggatttcatttctgcctttgagtttttactttttctttctttggaggcagaaattgggcataagacaatatgaggagtagtctcctcccttaagcctcccaagtagctgggattacaggcacacaccatcatgcctggctagtttttgtatttttagtagaaacggggtttcaccatgttgcccaggctggtcttgaactcttgacctcaggtgatccaccctccttggcctcccaaagtgctgggattacaggcgtgagccaccgcgcctggccaccatgctttctttcttagcactgaagaaactcacaattgttactcttgttttctgtggaacaaatttttataagcaaaaaaatatccaaggaaaaccacattgttttcagtagagtgctgccttctggctttcattttggagaattctattgcaaaccatgagaccattgcctaaaggcttccttcaagggggaacttgtgtttatttggtctagctctcaggagattggattacttctgtgaacagcttgttctgactgggctttgaaccctgtgtaccagaacaactgtgaaacacttacatcctaagattcagagagaaactcttgcctctagaaagatactagtctcctagttttctctggctgctgtcacaaattcacacaaacttagtggcttatcctctgttttatccacttttggacgctccagaggagaatccatcttcctagcttttgcaacagctagaggctgttcactttccttggctcatggccccttttctccatcttcaaagccaaccatgtctagttcaggcctgattatatcatatcactcttacttccacttctgcctctctcttccacctttaatgacctttatgactacattgggttcatctgtacagtcccagataatctcccaattaagggcagcttactaatgtgaaccaaaagtatctgagacaggtctcaatgaatttagaaagttagttttgccaaggttaaggatgcacctgtggcacagccacaggaggtcctgacaacatgcgcccaaggtggtgggggcacagcttggttttttgttttgttttgtttttgagacagagtcttgttctgtcaccacgctgcagtgcagtggtgcgatcttggctcactgcaacctccacctcccgggttcaagtgattctcctgcctcagcctcctgagtagctgggacgacaagcgtgtaccaccacgcccagctaatttttgtatttttagtagagacggggtttcactatgttggccaggatggtctcgatctcttgacctcgtgatccacccacctcggcctcccaaagtgctggaattataggcgtgagctaccacacctggccatccacagctcggttttatacattttcgggagatatgagacatcaatcaatatgtgtaagatgtacattggttccatctagaaaggtgggacaactcaaagcagggaagggggcttccaggttataaatagataagagacaaatggttgcattattttgagtctttgatcagcctttcacggaatacacaatttacgtgtgagaaggggctagaggaatagtcactcatgccttagtctggctcagtgaatctgcacttctacataagcagtagggcagaggaagcaattgagttctgtcctttgtcctgtacttatgaagataagctatcagtttatattgccagggtgagattcagcagagctgttttagggtaaagatcttgaggcccacaaggagttttctcttaggcaaattgtgggagaggtaggtagctttttatctttgtagctatattatttaggaataaaatttgcctgacgcagttcccagcttgacttttccctttggcttagtgattttggggtcctgagatttattttcctttaacactagcaaacttcattcttttttcaacctttaatttccccttgccatgtaacctaacatattcactggttgtgtttactaggatgtgggtacctttgtgagggtgggcgttactgtatctatcacagtccactctctggcccctaaagattcatatccatccacttgcaaaatacattcaccctattccaacatcccccaaagtctctgctcattacatccagggaatagttgtgcaaataaagaaattgaaatttgtcactcagggcttgatctaggaaggttgttcatacccagcacataactgactagaatataagaagctagtgctataactagatggatttttttttttttttcttttttgagatggactcttgctttgctgcccaggctggagtacagtggcattatctcagctcactgcaacctccgcctcccaggttcaagcgattcttctgtctcagcctccctggtagctggaattagagacacatgccaccacgcccagctaatttttgtatttttagtcaagatggggtttcaccatgttgcccaggctgggctcaaactcctgacctcaagtaatccacctgtctcagcctcccaaagtgctgggattacaggcatgagccacagtgcctggctgaactaggtggaatttaaaacacatatttttgaaaaatcattcaactgtgtgtgcagattctgtcacgcgtgaagagaccaccaaagaggctttgtgtgagcaataaagctgtttatttcacctgggtgcaggggggctgagtccaaaaaatgagtcagcaaagggagttaggggtggggcagttttataggatttgggtaggtagcgaaaaattatagtcaaagggggttgttctctggagggcaggggcaggagtcacaaagtgttcagtgggggagcttctgagccaggagaaggaatttcacaaggtaatgtcatcagttaaggcaggaattggccattttcacttcttttgtgattcttcagttggttcaggccatctggatgtatacctgcaggcttgggctcagaggcctgattcagtataaactcttacactttaaagtgtttaggatcctgaagtcaaattgtcataacagtaatactatatgtttctaaagcaaatctcagtttacaaagcatttccacgttcatccacctgtgctatctagttttgcccctgaaaataactttctgagcaaatagttcaaatgttattccctcttagcagctggggcaccaaggttcaggaagtcatacccttagtcatatagctacaaggtactaacactgacacttaaactttggacttttgccttcaacttctctggtcttttacgtttatgctcctttactctcagtggacaatgtaaaattaaatcagagttgtagaaggtcaattttttggtatgtgttaagtgtcttataaaaatacacagtgaaggccgggcgcggtggctcatgcctgtaatcctagcactttgggaggccgaggtgggcggatcacctgaggtcgggagttcgaaaccagcctgaccaacatggagaaaccccgtctctactaaaaatacaaaaattagctgggcatggtggcacacgcctgtaatcccagctacttgggaagctgtggcaggagaattgcttgaacccgggaggcagaggttgtggtgagccaagattgcacctttgtattccagcctgggcaacaagagcgaaactccatctcaaaaaaaaaaaaaccacagtgaaatagtgaaaatactttaaatatatttgaatattttggaaaattacttataatggcaaagtagaaaacaaataatcactaatagagtggttaaaagtgtgatagattcataaggtaaaatatagccattaaaaattgtatttcagctagaaaaattctcacagcatactcaaattaggatacagaattatgtaaagtatcctttcaactaagcttaaaaatagatgcacttatagatgaaatactggaataatgttaatagatttaacaatttctgggtgatgagttttttttaaatacttttctattttctcacagttttctctgagggtatgaatactctgtaagctggaaaaaggttattaaaagtattttactgataattgtgtgaggatgaggctgattgtcttcattcctaaatatttgtgtattaataattgttagatttttatagcattttcatatatttttttaaaaacacatgcattttgatcatttaaacaggtttactagaaaccaacaaaggattttggagcaaaataagaaccagaaggaagccaccaatgtaagtgatgagaaatgttataaaataaacaattgaacattttgccaattacagtgagaagcaaggcttacctaaaacaagtcttaaaaagaggaagatatgcattcataatttggagtggttttaatggtatagattacttgccttaataacttaatgttattaacgttaatgttaaactgttaatgtaatgtaaagttaatgttatgaagttattaataagaagcaggaacctatgtaggtggtaagatgggattcatactaatgttgctcgttgagtggagaattcttccttaaaatgcatccaaataggatcctcccctctacaaaggagaaagtatggggagaaagctgtgataaactacatgacacttttttttttttttgctttgttttcagactaccagtgagccttctgccccatctcaagatctcctcgacctaagtcccagtccccggatgcctagggccactctgggagaactcaacaccatgaataatcaactttcaggcttaagtaaataaacactcaggtcttttcagaccagcagaagagcttgatgttaaacagttctccttaattacgtgattaaataccacctaagaaggactgaagtcaggttgaatgtcagagcgctatgttaggagatgtgattacttcccggcaaatggttgagtcaaacccagtatagcaatgggatgtgtctgggcgaggaggtccttgaaactcatcctactcacttagaatctcatggaattcacctggcctgctttgtagaagttgttcagcccaatggccaatacttaaagtctactgtgaacctacacactattatcattgggtttttctgctatacctcagcatcaggtaagggagtatctctgatgcaagcggagaaattcagggattacaaggtatgaactgagtggttgtgaaatgtagaaggaaaaacacaggctttaaagtcagagaagtccaagttgaaatgccagttctgccacctctcagccacctaacttttgagagtctcactttataaaatgggaacaatgattgccttaaagggtggttgtcaaggttaacaaactaatgtttataaaatgcattgtagcaaagcttacaatgcattttataaacatttataaaagagttacctatcttacctgttatcttctgctgtccttattcccagcaagggtttggcaaattacaaaataaggatgatgaaaaatgctgaaatccagttttgtcaaattaaaagcagtttgtttttctcatatgtcatctgctgtttccggagtaaaaatattcagtatcactgaatttgtggttttcttagaactctactcagttctaaaatgttggctacttgtttatgtaggccagtgggatgtgtagagtcagttacattggagagttttcctgagtttttaattgagaattttcagagggggagggaattattccctttggggtatctcacttaagattatggcctggaggccaggcatagtggctcacacctataatcccagcactttgggaggccgagtcaggtggatcacctgaggtcaggagttcgagaccagcctggccaacatggcaaagccctgtctctactaaaaatacaaaaattagccgggagtggtggtgggcgcctataatcccagctactcaggaggctgaggcagaagaatcacttgaactcaggaggtggaggttgtggtgagccgagatcgtgccactgcactccagtctgggtgacaaagtgagactccatctcaaaaaaaaaaaaaaaaaaaaaagattatggactggagcttgaggtgaaggtagagctcagtatgtactgtaattttttacttttgtgctaggcagaacaagatgtaaaatcctttgcattctggatcagcttgggattttagaaaatccaatacaataatatttgttacccttacaacaacttcttctcatggcagggaaattctttctctctctacctaccataaatgatgctttttaatttctcttagagctaggaaatctcatgattttagggtgacagaaatatctaaattaatctcttttatttggtgggtttttcttttttttttctttttcttttttctttttttttgtttttactgtagaaaatccagcataactgactgacaaaatgttttaaagccaaacaagtccattttgtgttttagatttcagccttccaagttctgatgtaacaaacaacttaaaacccagtcttcatccacagatgaacttgctagccttggagaatacagagatacccccgtaagtatgtcagtaacactgcagaactaatatcatgacatttagattccttacaattaagaaaacctgatggctgggcgcagtgacttacatctgtaatcctagcactttgggaggccaaggcacatggatcacttgagcccaggagtttgagaccagcctgggcaacatggcaaaacctcatctctagtaaaaatacaaaaattagttgggcattgtggcatatgcctataattccaactacttgggaggctgaggcatgagaatcacttgaacctgggaggtagaggttgcagtgcagtgcagtgcaggcgatatagcacttggtacatagtaagccttcaataaattgtctctgtttatttttagtagtaacaggagatggggaagaacaggggaaatacaatgacaaaggaggcagaagagcaatgaggttcaaaattaagagtaatggccccatcagttacagggtacttgctgtgtggcaggcactcagttaagctatttttgtttatttcatctaatcttcactaaagtacttaggtcagcgatgttaggtcagggtcttgctctgtcactcaggctggagtacagtagcaccattataactcactgcagcctcaaactcctgggcccaagggatactcccacctcaacctcttaatagctgggactacaggtgtgcgccaccatactgggctaatctaatttttaaaattttttgtagagatggggtctcgctttgttgcccaagctggtcttgaactccaggcctcaggtgatcctcccgccttggcctcctaaagtgagccactgcaccagcctgttatcattattcccatcatacaggaaaagagactgagatttcttggtcatttctctattgaaggaactagaacttgcccaagtttgtatagccagtaagtagcaagtctgatggactgatagtccaatattaaaattggactaataaaacctgatggagtagctggaacctcctgagtagctggaattataggcatatgccccaatgcccaactaatttttgtgtttttagtagaggtgaggttttgccgtgttgcccaggctggtctcaaacacctgggctcaagcgatccatgtgcctcggcctcccaaagtgctaggattacaagatgtgagctactgcacccagccatcaggttttctgatagtccaatattaaaaagaaatattaatgacctataaacatatgcaatgatgttcaactttacttatagagaaatgtcaattaaagtctaataagaaattgttttctacttctcaggttggcaaaagtcccaatatttcataacatactttgttggctatggaaagacagttactatgacaaaattatgtaactcttataggggcaggtggcaatatctattaaaattataaatgcatttatttctttgaatctgcaatcttatctgtagaaatttataccacacttacacacagttaggtgtttacaaaattattctttacaacattttgggcaatagcaagtaattggaaacaactcaaaatatccctcagttggggactggttaaataaacatctgtacaacatattactgtctagctgggggataaaagtaataatcaccaatatatttattgctaagtaggaaaaaaaggtgctaagtagtgtgtgtgtaatatattgcatttgtgtaagaaagttggaaataagaatatatattaatatttgcctctattcacataaagaaacaagaatgatacaggaaggaaaaaactgaaaaagagtgaaagagtggttacgtaagttccagaagaggcaggatagaataaatagcagttgaatttgccttatgccaatgtcaatagcttttttccttttaagtgtatatattttagataataggcaacacattttcattattcagatatcaaaacagtataaaaagttgtataagacaattcttgttttcattccctcttcatcctccctctctccttttccctagtgtcacgctctactcccacccagataattatttgttaggttctgatttatccttccatagtgtctttaggcaaataggaatatgaatttctttctccgttattcaataaaatgcagcatactatcactgtgttctgaaccttttgtttttcacttaacatactttggcagtgtgtttgtatcagtggatttagattttttaaaaagtttcctagtgttttgtttaaatacttatgtacccaatcactgaattacttttctatatttaaaagggggaggggcagagggaggaaaatgagaaagaagaatcaaactgggaagaaaaaagagcaaaatataagggaagaagagaagaaaggattcatgtgttgggaaatgattaagtgtcaatggctctttcatgaaccactgagttaggtcagtatcttctgttggctacctcttgttttggctacatgcaatgcaagtaaatgttgaaatgtaggcagattgaagtcgcttggtaaatagtgtggtttaaaatagctgattctgtttgtgttatcttgctaatcttgttgggtaatgagagaaagaataatacagataaaatcccattacaacaagtgtctataaaattcattaaaagtcaaatttcagctaatagctgcctgttttaatctgtaacctacttggatctaataattcagtatgcataaaaatcacttgggtgactgtcaaaaagtcaaattgctggtccccagaaactctgattcagcagcaagaatctttaacatgcattccaggaggatcataatgcagtggttttcctatcatacattgagaaaccctatgatgaacatctataccaagattcgagggcgtatacctggtttaaatcatatgcctaagatcacttgtgagaggcaaaatcagccattaaaatgtcttataatgttgagattttttccatccctttgtttgcagtttaatttattcaccatcacagaaaaagtgggtgatgcagtttttcataacagaaagaatccttaaaaaacaataacaaagaagacaggataaaacataggtcattttttttttgagacagagtcttactttgtcacccagactggagtgccgtagttcgattttggccaactgcaacctccaccttccaggttcaagcgagtctcctgcctcagcctcccaagtagctgggattacaggcacccgccaccacacccatctaatttttttttttttttgtatttttagtagagacctggttttaccatgttggccaggctgtggtctcaaactcctgacctacggtgatctgcccacctcggcttcctgaagtgctgggattacaggcatgagccactgtgcccggctcataggccatatttatgacccatttactaacaggcaacaagctaagaagtatagaaatgcttactaattacttaacctatgaggtatgtgccaccatcattttcattttaaacaagaggaaaccaaggctgaggaagattaacttgccagtggttgtccagctagtactgagacaggattcaaatttaaatgggattcaaaatcaaattctgatttcagtaacttctctctttttgtttttagttttgtactttaattttatttctaaaattttcatatactaaaattgaccttttttgttttggtttggtgtacagttttatttattttaacatacgtatagattcaaataactacccccagtcaggatacagaatagttccgtcactcagcaaaactgccgtgtgctattcctttatagtcacacccttgtacccctgaccctcaatccccagcagccaggagtttattctctattgctatagtttgtctttgagaatgtcattcaagtagaattatacaatatatcatctttctagaagagattgtattaagttggtatttgctttatgtgttttgaagctcatgcattcggctatgttggatcttattggttgattgagtcttttatcattatgtaatgtccttctttgtccctcataattttctttgtcctgatgttgattttgatagtaatatagccactctagctttcttttgtttagtggttgcctggtatattttcttctgcattttacttgtaacttaactgtactaaaagattaggagtttcttagaaatagcctatagttggttcatgcatttttatatattctcataatctcttttaattgatatgttaggcaatttacatttaatttaattgtatgtagagtttaggtctactgttatatagttattctatgtgttcctttttttctgtttcctttttcctgctttcttttggattattagaatatttttagtgctccattttagtttattgtgattttgactgtatctttgtataatggtgtgtgtgtgtgtgtgtgtgtgtgtgtgtgtgtgtgtgaaataaagttgcttggtaaataatgtggtttaaagtagctgattcttttcctgttattttgctaattttgttagcaaaatatatatatgtatatatgtttatatatacatgtacacacacacatatatataaagagagtttgctttagtgattgcagtatacttatttttcagtctacctaaaatcaatgctttactacttgaaagtaaaaacctgggccgggcgcagtggctcacacctgtaatcccagcattttgggaggctgaggcgggcagatcatgagatcaggagatcgagaccatcctagctaatacggtgaaaccctgtctctactacaaatacaaaaaattagctgggcgtggtggcaggcacctgtaatcccagctactcagagactaaggcaggggaatcacttgaacccgggaggcggaggttgcagtgagccgagattacagccactgcactccagcctgagtgacagaaagagactctgtctcaaataaataaataaataaatacataaataaataaaaggaagtaaaaaccttatcaccatatagattccccttttctataatagttatcttatatattactcctctatacattgaaaagaaaccactaacagatgatgctgtaatttttgcttacaaccctgagatatattgcaaagaattcaagaagtggccgggcgtggtggctcatgcctgtaatcccaacactttgggaggacgaggtgggtggatcacttgaggccaggagtttgagaccagcgtggccaaaatggtgaaaccccatctctaccaaaaaatagaaaaaattagccgggcgtggtggtgcgcatctgtaatcccagctactcgggaggctgaggcatgagaattgactgaacccaggaggcggaggttgcagtgagccaagatcgtgccactgcactccagcctgggcgacacagcaagactctatctcaaaaaaaaaaaaaaattcaagaagagaaaaatagtctattatatttacccaatgtttaccatttctcttactattctcttctggtataatttcccttctctctgaagaattttctttatcagttcttttaaagcaggtctattgacagtgaagtctcttagttttacttcatgtgagaatgcctctattttgtctgttcctgaaggatattatcagtgactacagaatatggggctcatgcttctattctttcagcagttttaaaaggctgtgccactctttctagcctaaatggtttctagtgaaaaatctacattcatcggagttgcagttcttctatagataatgtattgtggttctgtctgctttaaataatttttctttttatccaattttgaacagtttgattacaatatgtggggtatggatttcttttgtttctttctcttgggggttggctgaatgtattagtttcctggggctgtcataacaaatgactgcaaactgggtggtttaaaaccacagaaatttattatctcacagttctggaggcaagaggtctgaaattcagcagagtcacactccctccacaactattacggggacatctgttccctgcctcttccagattccaatgacttgtgggtactccttggatttcttagcttttggtcatgtcactccaattcttgcctgtaccttcacctggctttttcctgtatgtgtcccaaatctccctctgcctttctaaggtgatttgtcattggatttatggcccacccagataatacaggatggtatcctcatcttaagatccttagttacatttgcaaagaccatttttccaattaagataacatttataacattcacatattctgagaattaggacatgagcatagcatttggggggccaccatttaacccactaatggaacttcttgaatgtggtttgtggctttatgtctttcaccaaacttgtgatgtttttagtctttcttttcttcagaactacagtctttctgctctcctgctggaaccctgatgacacaaatgttgacctgtgccattgtctcataggtgtttggggtcctgtttgtttgtttctttgttttactctttgcttctctctgtttagattggacactttctgtgatttatgttcaagttcaccgactgtttcctctgtcatttccattttgctattgagctcattctgttaagttttttttttaattcagttattgtagtttttagttctgaaatttcattttggttctttatatcttgtgtttttgctgagactttctatttttcaggtttttttttctaaagattgtttgcagttctttggagcatgtgtacaatagctgccttaaatatctctgagataatttcaacatctgtgtcctcttggcatcgatatctgttattgtcttctcatgcaagttgaagttttcatggttcttcatatgcctcataattttggattctatcttggacatttttaatgttttattaggagactcttggtcttaatttaaatcacatcaagaatgttattttgattttagcatgtaaacaacctggctagattcattccacagttttagccttcttctatgggcggtggctccaatgtcagctacattttcaaagcctttgcagtgccattcaaatatgtctcatgtatgttccatcctgtggtcagtctaaggtggcaggttgtttgttcacttctcaccgtttttgacattgtgactgagatgggatccatgcatgcccaggtcagggggtgagctcagtatttcataaacaacttcatgaggttgttttcctgagtcctccatcatcgtgatttatctggtactttctagtttcctgggactcccctttttgcttctccagtcataaagctggagctttagttaccctatgataccacacatttccttgactatgcttatgtctgactaaatggcaggacagaaaggaaaaaagctgtgggtatcacagctcctattgaagaggaagattcttctgtgtttcaatttcctacaagtcccattgcctcggctgtcgctacagccactttggggttgcctgtggtttgggttgtgagaaaacagagagaagaggacaaaaaagggacaagagatttctacattctgagtgttaggattgtttccctttcctgcttcttgagtgagaatgagaacccttctcctagagctctgtctgttctcattgatgcctggggttcagactgcattgcatttggtcaggaaatatgaagaggcaaaaaacggtaaattcaccaacagttcagtgatacttgaattctggtcttctttcccaatcaggctgctcctattattcagagtcctcaaatacttgctctatgcattccgtccacctttaagtgacattcagtggagagacagagtgcagtacgtttgctccgctttatcctggaccggagacctcacagctttcttcttaacctgtgttctatactacttctcatcctttaagaaacgatggggtggtagctacactgatggaaagactaaaggctctggtcttagtgttccgtgcacactccacagtctcagggctcccaccacccatggcatcataacctgatgtgcactaaaaccaattgttttataaacagttattacaaaatgacactttatgcagtctgaaggtaccttttaggttttgtttttagactaggaaaattatcttactttttgcatttgtgttctcactgtagggtaatcattctgtgttatcacactatcctaggtttgcccaaaggaccagccaaaacctcacctcaagccacgcatatgataatgtaagtaacaaaactcttttctagcagtgcatctagtcagcagattattgtagccagaaaagaactcatggtcattaattcccatgttctgctcagtattgtgttgatgcgcagcccctgttagcaagatggtaaggatcaaaatttttttggagtttgtatttgctatctccacttcctttccttgtattctctttgacttcagacatgctcttctaccactctatggacataactcttgtcaaggtcactggtgacttctgtattgtgaaatttagaactgcagttccatagtccctcattttatcagcaacaaatgacaaagttgatcacttcctccttcttgcacacatggctttcagacaccagtcactttggttcttctcctgcctcacgttcatttcttctccatctcttttggtggctcttcctcctctactgaccttttcttgttggagaccccagggatcaggcttcagacttttctatctacattcattcctctgtggtcttttggtctcatatcttgaaataaccattcaatttttgacaacctacaagtttgtatctcttgtagcccagaccccttctctaaactcagaactcatatatctactttccacttaatgtctcctcttgatttcttcccagtctccactctcaacctgcccttcctgcagacttgccacctcagtcaatggccactctgctctttgctgcataggtcaaaaaccttgggtaatagcgcttgacatccacctttttacttttacttttgccttttacttttaaaatatgtcaattattcagccacttctcaccacctccacttctgcatcttagtccaagtcaccatcggatggacattgcagtggcctctaagggaagccctgtttcaacctttgcctcccttcgcatccctcccacccacctcataatctgttctcaaaacaaaaacaggggcattcttttttaaaaagtgaagtcatattatgtcactcatttgctcaaaacccacctgtgattttcttcctcactccattttactcagtaaatgcctgaaatgccgatctgaccgcacccgtcacctctccaggctcacctcctgcccctctctaccttggctcactctattccaaccacactggcctcccccacttcagagactgtgaacttgtgtcctctccagtaaccacaagactcactttagtcaggctctgcttaaacgtccccagtgatgagacatttcctgaccacgacctattagagcagtattccaccccagtctctctcccacccactactctgcttttatattagagcacatgccattggatatctgttcacatttgttgattgtctgagtcatgagggcaggaacttggtctgctttgtttattgctttattaatagtgcctggcagctggtaggtggccaggatatatttgtggagtgaataaggaaaattatgagaagagatatttctaattaagattctaatattttatcaatcctgattttgttgtgtcactgagtgcctctctgtagatttaaattttttttttcctactcaaggctgagattttatattcagagtgaaacaacagagaatctggcctgagccattgaatctgcttcatttttaaaagcaatatatggtttttttttcacagtttctatgggaaatagggtgcattaggcataaaatcagacaaaaatatagtaaattcttgtttttgagacagggtctcattcagtcacctaggctagaatatatagcatgatcatatgatcataactcactgcagcttcaaacccctaggctcgtgatcctcctgccttggtctctggggtagctgggactacaggtgtgagccaccatgcccagctattttttttttttttttgtagagttggggtcttgctgttgcctaggctgatcttgaactcctgggctcaagtaatcctcccacctatcctcccaaattgctgagataacaggcatgagccaccatgcccagcagaaaagtagtaaatctcgtaagtgattattacctaaaaaaactaaagtaataattaaaaacaacttattcttgtccagttcaaagttcttggaacaatgtacttgcaagtgtaggagtctcagtaataaaagaaaagcttaatgtagaacgtttatatgaacatgtgttatgctttcttcagtttctggaacattcaaattcagtgtttctacagccagttagtctacaaaccattgcagcagcaccatcaaaccagagtctgccacctttgcccagcaatcatccaggtacatgggaccttattattcgcatcaaataaggaaacttatgagaatatatgagtctgccagagattcattggtaactgaaaataggagaaattagagatgctcttttgtatttttaagctaatgaaacaaattcagggcagataccattatgactgacttataagagactgtaaaaatgcttgtgttaaactgagtattgtgttttgaatgctaaggtaaatgaatctttagttgaggtttggaaacctttttgatacatacagatttgttgaacttgggagtagcattgggacaccagtctgttttggttgtgtttattaggatctaatatttgaagtctaaattataaaaagaatatcaattgcgtgtactcctcaaaaagcacaatatgtttactggtctctttttttgcccaaagcgatgacaaaaagtgatctccagccacctaattactacgaggtaatggagtttgatcccttagctcctgctgtcactacagagtaagtcatttacaaaatgattaatttattttttgtcttggttccctttgatagcagagctaacagggcttggttatacatttaactttgtttaggtcttggcagaaattgatggccttattaaaaatgccttatgaggttttatggcagctgttactcttaatggtcttatcgttccggccttgtgactaaaaaataaaaatgctggggttgcatgttaagaaataactggaactaacctgcttaatggactcctcatagatcccttggcagaaagtcatgttctctttagcttgagaagggtactagtcactgattggtgacataagtttatgccacattgatggaatattttagctgctctttatgaactgatccaaaaaaatcttatattagaacttgtttttagtcttctaaagcattagtacaattactttttacttaaaatccttaaagcaacattcttttatgatttcatattggtcaagatatataaatattaatggaatggtaaggtcataagaactttaatatactttgagtgactgaaggttacccccaaattgttaaaaattattaaagcacgtttattggaaatcattgttcagaaactgacagcctacaggctctatcttgcttgcagttgtttgtttttgacctgtgcagaatttaaaatgtgcatttaaaaaattaattgctggtttgggaaactctcaaccatgtttttcctcagctctcactctaatataacaatgaatgcagagacttctgtggcccccaaatatgtgaggatttctccccatcagcaggcaagcaatgaattctacaatggacaccagctgggtgtcctctgattcaattccaacaccatctacctggagatagtgtcagaccccacaggttgagagctcagtccccaccaccccgacacctaccttcccagacaccagtcacaagcctgggcctctaaacttaggactgactggcttcaagttggggttcccatgactgcttctttgggtttgattagtttgctggagcagctcacagaactcagggaaatacttatatttactggtttattataaaggacattgcaaaggatgcagatgaagagatgcacagggcgaggcatgcggaaaaggccatggagtttccgtgccctccctggagtcccaccctccaggtacctccacgtgttcagctatccagaaactgacctgacccaaccccaacccagtcctctagggtttttaatggaagcttcttgatgtcagcattccttcccccagggtatagggcaggaccctctctagggaggctcttatgacccacagtgacaaaggtgggcgattagagtggtgccttggggcaggtgaaaggaggactagagaaggtcgagagattctgcttccagaggctggctcctaaggcctgacacacccaacattataacaaaagactgtaacaagggctatgggagttgtgagccaggaaccttagacaaaaaccagtatgtatcataagaccacagttgccaacagctgaaaactcggatatttgaaaataaaaattctggacttctagatcatttagatactctgtcaacacgaagcctgaatttttacgtgctagctatgggctggggttgagtagtagctatctcctttacacaggtaggctctgcagcccctcaggtcctgttaccacccaaaaaacccagggttcattcacctggatagtaacagatatctgactctccacaaggacacaggttttgatcaataggaattttattacttagcacaagtaaattctttaggggccaggatcagaaagcgttcttctgtaacttcttcatgttgaccagggacactgtatccagagatgttagaggagtgaaaatctctaggcactaaaactaaatatgttttagggtctcccaggataggttgcaaaggcacctacagttgaaatttttctaatctggaagatacaaattttacgaagaggttaaagatgcagggaccaaacaacagtagtaagagcaataaaattagtggcctcattaggggaagaaaccaagtaacacttggtattgctaatttgagaacttctcaaacagaattagaagtatggctattaggcctgatgtggtggctcacccctgtaatcccagcactttgcgaggccaaggcgcgcagatcaccctgaattcaagatcagcctgggcaacatggtgaaaccccgtctctactaaaaatacaaaaattaggcaggtgtggtggtgcgcacctgtagtcccagctactcaggaaggtgaggcagaaaaatcgctagaacccaggaggtagaggttgcagtgagcccagatcgtgccccactgcattccaacctgggcaacagagcgagactgtctcaaaaaaaaaaaaaaaaaaaaaatatggctgctgattaaaagtgtggaaccaagaggcttgggcatggaccttcctaatgttaacttcctatttcccctgaggtatttattcaggtacagcaagaggaattaataactgcacactctcctcctccctgttctgctaagaggcagtctaatgctatacaattatctagtaccgcattagccaaggagtcatatgaggccccaagtctggaacttccccaggaactagggccagcatggcagtgccatgggctcagaacacctctattctgtcctgatttagagaaattgtggctccaaacttagtcagaaggtcccttcccaaaaggagaatgggatgtttggggaacagaagaaagaatgagtgaaagttttagatactatttcatggaccagaggctccaagaatcttttatttcctttatgagacacaccccttatatacatttcttcctggatagggtccacttttagtgatcaacacagaaaacatggctacagtgttgatcaaaaactcagctggtggccgggagcagtggctcatgcctgtaatgccaacactttgggaggccaaggctggaggatcacttgagcccaggagttcaagaccagccctgacagcataacgagaccttgtctccacaaacaaacaaaaaaatcagccaggtgtgccttagtcccagctacttgagaggctaaggtgggaggactgcttgagcctgggagttggaggcggcagtgcgccatgatcacggtgctgcactccagcctgggtaacacagaccctgtctcaaacaaacgaaaaaaaatccaactggttgccccccttcttctgtgtaacctggggctccttgggggagatgtggatcttgttttgaggagccaggcagggagccccatgtccccatccatcagtttcttgtccagttacagggaacaggtaccttgggcttgtcctcctccttccctctctggggatgatttggacattccctttcctagcatcctttctgcttccagtaagcatattgtttgggccccagtgtaggcaggccctgagttccatggtgggggccctggtcactcacccatgccatcttcttcctgggcttcctgaagtagtctgtagggctgccgcatcttcttgtcttccttttcatcagatgccacatctctttactatagaccttaaaggagatgtctaccagttggaaagggggagtatgtggatttattgccactttttagagttttctctgaatatctggggctgagagatgaagtgagattaaagtactactcagcttttgggtcatctgggtcccaaggggtgtaattctggaggcattcttattatcaatttaggaatgctgatggattttcattagggccttgttctatttctctgagatttccccaattgaccagggactggcttgcttccctcatacctctgagaagcatattcctataatgatgaagccactcttgattcttgttatcactggggtcccagtttgggttggctattgggactgacacctcaacgggccaggtcaccaggttatcagcacacatattgtctgcctcctccttagttttggccatggtggcagatttatcttctgctgtgagcagggttgctgttacggtctgcacacctggccaggtagggttatgtgtggagaatattctccatatgagagttacgaactctcgtgggctcacccataagcccttactatgggatttccagttatacaagtcaacagttttaaaaaacacatagacccgagcaaaacctctttctccaacaggcatgctctgagtggcaacagtcaccctccagggttatatgcgttcccactatgagtggtgctccctggcaaagaagagtgcaacaggggcctgctattgccatagcaggagccacagctggctctgcagagtttggagggcctggcaaatacagaacgggcccttgcttttccctggaggtgcagagggtaccatttccaagaaggtggactatgcccctgtattggccaaggttccagtccccgagtagagttagagggcctcacttctcttggagggggtagtaaagggactcttcttacttgttcccttccctataggcccccacatgactgatgcttcctctccagaggcttctagaattggcaatatagttccctttggccaatttacatattctgcatttcatctgcaaggcagggttttgatagagggccataaaacattgcatatagggcatttcttcccatttaccatgtttcttgcaaaaaaagtccaattggagagttgcagtaagtgacccatattcagaccatctcttctgatctagggaatactggagccaggctgtattacagtaatatatcatttgctttttggtcatgggtggatatgcagtttccattgccagaggaggcaccctaacaagctctccttccaagacctagttcacgacattctacggtctctgcacacagtctgaggggcttccaaactctggagattaatgatgacacaaatcccacaactcagcttgaatacttctggtcctctttgctggccaccatgcaaagccatccagaggtcctgggaagctgagaggataacagggatttcctttccctggatcatgttcggtccgggcagcctcccaggagatctcatggagacaatgaagtagttctggatccagctcaggtggtggggaggtaggtaaatcaatcaagtgagtgaggtgtttcctcagagaaagcacacacactgttcatgtaacctttgtatcactgcattctggttccagggatcatgatcccaccaaaactgccccctttgaaacttgggtctcctcatcaaactaacagcagtccttctgtgactgctgcaaaacaaagcctgatattttaggggttgccacagactaagggtagaagaatccagacttcatattcattcaggccacagacaagtaagaatattgagccctacagttataccacgtagggaacaaagcctgaagacaagcatccttgtctttttgttggggattccccttgttaaaacgatggcgatgtctctcagtctcccagacctgaaagaaggaacttctttttctcaacaatcctggatcccttgacctaggtcctaatcctgacaacccagaatcctaatgatcaaaacccagaccactcttttagtagttcatggagctgctgcttcaaagcagcaccgagcaaaaggtctgggctctaggcagccgcttctactctcccagagaggtcttgtggtgctggtcagtggactacactagacaccaggtcaggggtcccaaggcccttctctagtctccttcttggcaactgaggtgagttggcccacgcatgcttccacatcccactgctttgcctgccaggagcctataagggaggtcaagtcagggctcaaccctgggtctcatctggggtaccagacttgttacccctaaaaaaacctgagattcattcatctggtaatagacaactctccatgagaacacaggttattattattttttcttgacagggtctcactgtgtcactcaaactagaataaagtggcatgatcacggcttactgcaaccttgacttcccaggttgaagcagtcctccctactcagcctcatgagtagctgagactattggggtgtgctaccatgcctggctaatttaattttttgagacagagtgtcactctgtcattaggctggagtatagtgggggtgatctcggctcactgcaacttctgcctcccaggctcaggcaattctcatgcctcagcctcctgagtagctggggactacaagcatgtgccaccacgcctggctaatttttttgtatatttagtagagacagggttttgccacgttgcccaggctggtctcgaactcttggtctcaagttcatctacccacctcagcctcccaaagtgctgggattacaggtgtaagccaccgtgcctagccttttaatttttttcttttttatagagaagggggtctgtgttgcccaggctagttttgaactcctgggctcaagcaatcctcctgcctcagccttccaaagtgctgggattataggcatgagccactataaccaaccaagaatgcaggctttgagcaatagttttattacttgtcacaaataaagcaccgggcatagtctccaaagcaggaaagtgacaggagggttttatggggtgatagagagggaagagggtatgtcgttgcatggaaaggggttgcagttgtgcagatgcagtgagtcgttatttcagcacacaggtcacatgttatggtaatgaagctatagcatctcccagggtgaagatactagcatggtaatgaggaaagtacactgggatccatctgtaaattgctgaggtctgtcatgaactggtttaaaccagctagctggctgcattccacacagggtttggggaaaaaagcaggtgattactcaagttgattgtactcctatagtccctggagacccctcctatctgcttccagccccacccaaccctctgcatctcttctttggctgacatgtgtagacatttgatattctggtccctggtttaatccctcaatgtaatggttgacttaatttatgagcagatgttaagggacttaggagtccactatgtattttttcctaactcaggtttgagaaatttctctaagtcattctgcctgatagagtagatatatcactgatcatattagtggtttaagacactggcacttaactaggtatgctttctagaaacgtttttttaatcagtttctccatccaaacaggtagtggaaaagttcttgattatattcaaattaggagattgctgtatgttgatacggcagtgtcacagatactggcggtgggagagacagtaaaaagctggaggtgaagctttggaactcttttatcactgtggtgggtctttctttctgggggtcagaatgtctcagttcttttgaaagtcccatgaaattcagggacttccctccaaggaaaagcacagaatcttgcaggaaattactgggtttttttcacatcattggttgtccatgaatcccaggttgacaatttttgctctaccaggacaaacagtatgtttatgaagatacacacgattcactaatttcaatattatgtgccagggactatgactggactaatttataattctgaacaagaaacatgctcccttgtcctcacagaggttaaacgtagtatggatacagaaattagacaaaccaccaaatacatgtttacaaaatttgtgttaatgttatgaaagaatatggcaacttgaaagtttgtaacagaactaatttaaatgaggattagagaaagcttcaggtagcattaatgctgaggcctgcaattcttagttaagtgaaaagtttggaaatgagtattgtaggcccaaggaacaacctgtacaaagacccagaggacagagctctggcacattcaaggaaatggaaatgctaaaaccaagagtaaagaaagttaacagggagctcagtaccagatgaggaaaatgtaatttggaagcaaaaaggagcgagtacaactgtgaagaacagtgccaggggcagacaagtaagataagaactgaaaactagataatggattggagatcattgatgattttagtaaaagctactttgatggactgatgaagacagaacccaaatttcagtgcatttgaaaagcacatgagagattaagtagagacagtaagtacagataacttcttagaacttaaatatgaagcagtgatgaaaacaggtttggggccgggcacggtggctcacgcctataatcccagcactttgagaggccaaggcaggcggatcgcctgaagtcaggagtttgagaccagcctggccaacatggcaaaaccctgtctctactaaaaatacaaaaattagccaggcgtggtagcgggtgtctgtaattccaactattcgggaggatgaataggagaatcgtttgaacccaggaggtagaggctgcagtgagctgagatcccactattgcactctagcgtgggcaacaagagtgaaactccatctcaaaaaaaaaaaaaaaaaaggggttgttggtagctagaggatactaaggcatttactacaagaagagatggaattaaaggctgtactttgtataaaatgggagacatgggagatgctggagaatctgtgaatgttgaagaataggatctggcatagaaggagaggttgaagactcaggaagggaagaataactgaatgggtcaagtgcttcagaagccaggaatagacaggatcacagaaataatggacaatacaaatgaagataaacttgaagatttagtgatgggaaaatgaggaagtttccatatcaagacatttaatgtattaagaatgcagtttctaccagagagtttagaggtttgaggagagtgaagaagactgaaatcgttttgagggagatgagaccaaactttttagggaaacattaaaattgtagcaccattctggggccttatgaacttggtgatcatggtttcatagcgctgtgatttttgagatttttcctcagccatgttttgctatactgtatatatgaatgttgtgctttcaggtatattttccagctacagacatatgtaagacgcatataaagaattgaatgggcctggcatggtggcttatgcctctaatcccaacattttgagaggctgaagtggaaggatcacttgaacctgggaggtcgaagctgcaataagccatgattgcaccactgcactccagcctgggtgacagtgaccctgtctcaaaaaaaagaaaaaagaaaaacgaatgaaggatgtcattgaaaaaatacaatataaaaaaagtacagaaatgacagtgatgagctatagatggctgaggagtctggactgtaatcacatagtttaaataagctggaagattaattttttttttttttttttgagacgaaagtcttgctctgtagcccaggctggagtgcagtggcacgatctcagctcactgcaatctccgcctcctaggctccagtgatcctccgacctcagcttcctgagtacctgggactacaggtgtgtaccaccacacatgataatttttatgttttttgtagagatggtattttgccatgttgttcatactggtcttgaaatcctggactcaagcgatccacccacctcagcctcccagagtgctgggattataggtgtgagccactgcacttgtcctaatatttttttaaaaagtttgaaaccagaagaaactgaggagttttttaagcaaaacataaactgtccaaatttgagtcatatttctcatttcaatcacaagaaaaaattaattggttctatgaaatacatacttttaagagacataggaattgcaacaataaggccgggtgtggtggctcacacctgtaatcccagcactttgggaggccgaggcgggtggatcacctgaggtcaggagtttgaaaccagcctggccaacagggtgaaaccctgtctctacttaaaatacaaaaaaattagctgggcatggttgtgtgtccctgtaatcccagctactcgtggggctgaggcaggagaatcacttgaacctgggaggcagaggttgcagtgagccaagaaagcaccattgcactccagcctggacaaaagagtgagactctgtctcaaaaaaaaagaaaaaatgaagtgcaacattagaatttaaataaactagaatacacacttcagggcagagacttatttttactcatatgtagcctgaactccaaaaccagctcaatttttaattacagtgctggcagttaaaaaccaaaatagcactttgaaattgatacataacccttttgctgtgatggctttgtttcagagctatttatgaagaaattgatgctcaccagcacaaaggagctcaaaatgatggtgactgaggtaaagacttcaacttatacaacttaattccatattccatataatttcagtataattatcactttacatatttagtatttaaattttctaagggccatctgagtctgacactttgaaatatgagttcccctgaatcattcaaattgtgctgaaccattgttcactaatgagagtcattctttgtgattttctcatctgtaaatagtaaggcttgggaatacagtagtttatggtatagaaatattaatgctaacaaaatagatgagcaataggagtagcactgaaatcaggcatttgtttttcatatgcagttaatacttgttaaccggtaccagtagacccatttaccgttagtcctccaaataggtctgaatttttcctattttcagcactactaatcccatgtatttactatttaatggtcaccaatgaactatcaaaacttatttattccccttataccctcccctatggaagaagcacattcttacctttcttctactagactgtgactctccagcttcccagtaaagacaagagagttatcaaggaatggggaaagagaaggacaggatgaatactggccattttcttctctttattttagaagaaagtggatgatcagctcactaccacatcaaaggtgccaactctctaaaacgtagactctgtgcagctttgaagcctggaagacaatacctaccaacatgtcaaagccatggtggcacatttctgctataatgaagattaaatagaataacagttccaggataacactgattcctgacaacagcgtgagatttcaacagaacttgtttggaacaaatactcacttaaaacttcagcagaagaaaaattacttagtccttaggccaaccaatttaactgcagtgtcatgtttcacaggccttcctacatttagaaatcgtcacacagctgtgataagagtagattattttactatgaaataattctgaatagatgaaagcataaaatgtgagaaactgaatgtattattcaggaagaatactgagtgccttcatttaactaaagttgaatgtaaaagtcaatttgcacttctttataatcctctggtttagaattataaattgttaaaaccttgataattgtcatttaattatatttcaggtgtcctgaacaggtcactagactctacattgggcagcctttaaatatgattctttgtaatgctaaatagcctttttttctctttttactgcaacttaatatttctatttagaacacagaaaatgaaaatatttagaataagttgtacatttgatgacaaataaatcactattaaaacaatttaatactttttttttttaacaaaggtttgtttccagaagaacttttgatgtcagtaaatcttcacaatcccacctgtacattttaacattcatggacttgtaatggtgatgctttggctaacagcctagtagatgtattttatttcaattttatgatactacagtttcaaagtaattattcagaactctgaatataaaatagccctaaaccttaaaggacaaatcaaatttgaaataagaatttaaatctttggacaagctgttagggcttagtgactcctcttctactttgagcttttaaaatactgactattcataatgaaggaaaatagcaaccaactcttttagacacaataaacatggttagaagttctggcctatgacttgaaacaaataaccctgagcatacatttttgaaaaacattgtcagattcattgctgtaagtatgaagagttaataatctggaagggaattatggaattaagctgaacccatgcctgcatatttaaaaaacaaagcggcttattttaatagtatcaaactcttcagtatggtattgaatagtcagtcatatattctagctaggcatatgagtttcttatgataaaagctgaacttgttctctcaagtttaagtgaaaaaaattagttgagaaaaaataattatttaaaatataagccttcatattattgtacaatatttctcctttgagaagataggatatatgattttcccaaaaatcacaactttgaaggaagacttagttgctgacttcaattatatcctggaactggcaacttgtgcccttcctttgcttcaaaaaaagtgtaagaaagagtgataagatcaactttaatcattcttggatcttcagcaaattcaggatcaatgtagaaaaacactggcatatctacttcctcttggggattaagcctttgttcttcaaaacagaagcactggaaattatagaaagattttaataacatttctattctcgtattacataacagaaactatacagttcttttatcttagcattccagtacacttcgtgattttaataagcatactattaaatacacagttctgtgataaattaagagcatcttttcatctcaatgagttctgctttaaggatgaagaacaaattctaatcttaaaagcagatatccatttggtttggttctcaatctctgcatagcaggtatagatagtgaagaaaaatagcttgatgtttagaagaaattcgttttcagaaatcacaagatctactaaaacactaagtttcatactaaaccgtttcatgtatctttatcatattctgtaaagtttacactttgatgtacctgtattttattgaaatactgtccagcttcaaatggaacaatattgtatgtagaaattccaattactggtttgtcagtaggattcttagctctgtaaaacgccagtgcagtctctcctggcaccacctgttttaaagaatatatatattatcaatactttgaatctcacaaagttcctcttttccctgctaaattagtctcattattttgcctattcatcagaccataatacctaatctaatgtagggttcagcaaaataaattgtgaatattacccataaacatatctgagtttaaaaacttacttgcatatgtcaatgaagaaccaatgttctaatatccataattagttatgaactgtcctcttgtatatttgaggtcttcaaggaataatcggcaaattacattatttaaaatgtgtccaagccaatcatatcacagccctagcccaacttttctgtaacacttatacctgaatgtcatgattgactattttttttaaaaagataccaacattaaacttaccttaaaatcagaataaaactgactgactagaacctttattatgccacaaagtgttaatactttggagaaaataagggaatagcgaggcttaaaaaaattttccaaaggatattctgtcacttgtaccaattcagccactaatacctttgtatactaccacgtaattggagaagattcataatcataacctataaaatctttattaagagattcagtcatgtttactaaactgggcaagcactaatatttataaggcttttccaatatgggttgaaattaactcactctggctaatcctcaattaatgagatttcagttaaaatctttcttacagttggttaaaattttaggaaagcgtttaggtatagtctcagtctcactggagtataacataactatttactacttattgattatttcaaaggccctcaatttgttttcttttagaaggacagggatacttttgatataaaccagtaaactactcattgtaaccaatgcttttccacatttttcccatgtcttctatgcctgaggaaaagtcaggaagctatatagcctgacggttactgctactcccaactgtttcactcatctaaacttaatttcaaaatactgacgggttccattactataaatttttttattcccatagactactttttaatagtgctttacacctaatgtaacagaatttatactttaacttttaagttacatgatagtaaaagtcaatttggaacaatggaaaatgccatgttttattagaatcatagtgttaaaattagtcctctgacagtttaagtgatgaaagaaaggaatttacattaataaagtaatcttttaatgactggttagtcacttacatatatttctgtttgctgaggtctaaagttccactggagacttgcatgcacatctgcattaaagctaattttaatgattcgatctttaacaggcaccatgttttcaatcttgtctgaggcatgacctgcaactgctgatcctccaagtccagtagtctagaaaaagataccaaatatgttaaacaatacttttaggtgttgatgatctatttatttgataaaagtttaaaaacaatgtagtatttataatccatttggagccaagtttacatatggtaactgaccattgctgtaactgtgtcaagaatctgactacttttgggatgtcatgagcctgtatttgttaaagtcattcctatttttcagcaatcccttggttacctggcatggtcaaaaatgagtctgggaaaagcaggttcactagataagtcaactattatcactgatagtcgaactcacaatttccagcttagccatttataaaaaacacatttccctttattgctagtatttcattaatagaaataaaatttacccatgaccttgtaattccactgaaaatacttaactcaatttttccatattcctgtctggtccttttccatatcacagcttttataatccaaataagattgtagcttcacttttattaacattctgcttttctaaggtatcacaggtattttcccacgttggttaatggttttgaatcttttctgtacttctctgtatagtagagcttttatataaatcactaatcagagcacctaatccctatggccacagaaataatcatagggcatcaagagtatttatgtctgacatttcttttattcatgacagttatttccttgacatcacttttaaaaaaagcccttacccagcactttgggaagccacggggggcggatcatgaggtcaggagatggagaccatcctggctaacacagtgaacccccgtctctattaaaaatagaaaaaaattagccgggtgtggtgacacgcgcctgtagtcccaggtctactcgggaggctgaggcagaagaattgcttgaacccgggaggcggaggttgcagtgagccgagatcacaccactgcactccagcctgggcaacagagcaagactccatctcaaaagaaaaaaaaaaacgcccttacttccaaggtcatctttcttctgatacttgaggttgccagaattctgatttctggataatttgcctgttactatgctaggaagaaaaaacaaaaaacaaatttgaggctaggggaagactcccagcaagatacagtgttttagcattctctgtttgttacgcaagtcaactaacttcatttgactgccatgcaacattactgaattacattatatccctaaaagatgcatcagagggcaagcctttatccttgtttatccttctgcctgagtgctgtgtttaagatgtaacttcttttactaaaaaatttaagtcacttaaataaaaatacttttaagtgtcctccctcaataaagattccaatatagtctttgaatatgggttcaaatttctaagttcaatgcctaaagtaaaatagacaaaaagactagaaaacagcactaaaaagatgtcctggtctctattctagttgtgctactagctctaagaacctgatagattacaaattacatttggcttcctgatctatgattgcatgtgggcacatttcacacgcaatattatcagttatttcagtttggggcagggtttctcaatcttagaactatggacattttgggctgaataattttttgttgtttgggggtgaggcagtgctttgttggttatttagtagcattcctagcctctacctattagatgccagtagcaccctatacccccacctccatgttgtgacaaccaaaaatgtcttcacacatcgctaaatgttccctgaggggcaaaaatctcctggcggtctgagaaggatctagatttgctgatttggattcagttctgcttatgatttaaccaactggtagttttagaattcatgcttgggcttggtctctgatgaaaagtaattcacattctatactcatcctcaaaatcaactattgcacattcccacataaatgctggcattaggagactatgccagaaaagaaaagtccttttgtcttctgcttcatcatctaaaagaaaggtaaattgatttccacgggcatggtggctcacgcctgtaatcccagcactttgggaggccaaggcaggagggtcacttgagcccaggagttgagaccagcctgagcaacatagggagacctcgtctctacaaatttaaataaataaacgtgcgcgcgcgcgcacacacacacacacacacacacacacacacggaaagagtgaactccagctaagaataccagtcatggtgttaaaaaaacaattcccaaactttcctgcacgctggaatcacctaaaacatacttgacaattactgatgcctggttcccactgtggccttgtgataaaatgggtaatgtgtgtggatttttagaagctgtccaggtgattcccaatgttgctgtacaatgaattttgggagccactatcttaaacacttactgaatcacttgtggcatgatttttaaaccgaaattcctgtccctaccctagacttcctaaccagaatctctggggtaggggatccctggaacgtgtatttaacgttaagctccataggtgatcctaatggccagccaaagctgcaaattattagctaagaacaaaggagaaatctctaaaatacgtgaaacttgtctttgcctgtggttctcaaaacttgccctcaaaatcaactacaggacttaactaaaatatagagtgctggtcccactccccttcttctccccgccccacccccccaccccgtgtttctgactcagtcctggagtcgggccctagaatttgcacttttaacaggttcccgggtgatgctgatgctgccggtcctgggcgccacactcccagaaccgttgcaatgtacttaacagtttccaggttaagtacattacagttatatattaacaggggtggggcgagagagcctcaaaggcctaattcatgcctctttgtacggaggaactgctaatcccagtttaagcccaagaaacacgagtagtccaatttccagagttacccttggcacataaaccacatgtggtttgcagagtgaatgtatgaataatacattttaaaagcgtgtgtgcgcaggagggtaaggcagactgctagatacccggttagaggctgcggacctttttttttttttttggcgaggtgcagttcatagatcaggggtttcactctgcagcatggtataagcacaatcactaagaactggatgctacttgcagttttgtcaccaatttctttggtgactttgggtgttaagtgactgttttgaacctctctcctcttaggtagataatatcggaaacctcttccacctacgacccgcagagcgagggcttgtcccgggatttgtcttgcacccccacctctcgcgtctgcgccaccctgcgggcggcgccggcccctacctggcaatagagccgataaaggggtacggcagcgtaggacgcccccagcatgcccacggcgacagcggccacgtaagtgagggtcgtcttgttctgccgccgccgctcctcctcctgcgcgcgtgtgaaagggttcgagctcttaggccgccgcggcggctgcaatgctggatgccgggctcgaaggctgcagcgcttccatgtcccaagccacctcagtcctctctcggcacctcctgtcccactccactctggcctaagaaacggctctaccctctctgcagccctggttggagacccagggtggatccagcgccagccacagaaaggaacgcacctccatccaggacgccagagccctcccataaccctctgaactaacacccacccgcctctcagggacgagaggtcaaatctcgcgaggcgtgctccgtctcgcgagatctgggttgagcctgccgctgccttggctaccaggctcctcaggtggcagcgcttgcagtcgggctacggaggccgggttgccagattacgggtaagtttgcgttttgctttgtgactgttactcccacttcgcttctcgccagaacgtctcttaacatttaggaaaatgcgtttcgcccgtccgcgtgcaagcttgccatcacttggggttgcgcctgtgatctttatttaaactccaccagcctttgtctcgacccggcagccccggcgacgctctcccgcggtcttttctcctggggtcccttggccgctggctcctgtgctcactgccctggacttagttcaagtatcacctctctcaggaagccttgctgtgttaaccgcagccctcatgggcacccacgacacctgcattttctcagcccgtgggcagtcggcttcccctgctctgatgccccttacaacttgcccagtggaaagcaccacagctggagcaggagggaggctgtcacgctgaagtttgttctggagagagtgaccaggataggagggccatttaaggagagactgaaagaaacgaaccccgtgggaggatgtaatagctttcttcagttgtcccacaggacgaactcgaggggggcagacagcatagcggattttactgtgttagaaggaagcatctttctagaaactataaaatagcagttaagagctcaggttctgaggttagggggttctggatttttacccgggtcctcaccatggccctgtgcccttaggtcagttacttgtcctctaagacctggtgtccttacttgtaaaatggaaatcagaacagtaaatgaataatattcatataacgtctttcatgatgactgaggcatagtaagaatgtagttaaaagttaggctgtatttctacttgctacgtggccatttctaatggccagagcaggtataattatccccactatgtggatgaggaacttggaggcctgagaaattttaactagtcattcgacattttatttatttattgccctctcaactgtgggcctgacaccaatcgacctgctggcactatagcacagaacaagtcgggagatcacttcagtgatggagtgtcctttctgctgagggactcagaaaataatcaagtaacagttaccgaaataagggaatttcagataacaatcagtgcagtgaagacaatgtaataacatagtatgattgacagtcatgagaagcggtagtaaagtaaggacgttttgaagaggtgacatttgagtttagatctgaacgatgataaggagctacctactcaataacaattccaggccaagcaaaggcccaggggaaggaaagagatagaatgattgaagaacagaaagaaggccactgtgttcccaacatagcagagtggaaagtggtaggaaatggggtcagaacaggtaacaaaggcctggtaataccagccttttaagccatgtccaagggtttggattttattctaaaagtaataggaagctattggaatgtttgacacatacaagtgatgtgatctgactcacatttttgaaaagatattgattactttgtggagaatggattaaaggtagggggaggaatggaagtagaacaattaggaagcaattgcagtagtccacatgagtgatgatggtcaccttgagtgagtaattgattaacttgtggtcacagggccagaaaattgcagaaccaataaaatataaataccttctgacttctttctatactctggcatactgtctcaaaaatttcaggtctccatgattctacaaatttattcatattgtgtgatgacagtgtttgaaaatctttttcatctgcatgcaccttggttcttgtaccagattctcagctcttctaggatgagatttctcaaagtttaattttcttacagcatagactgaaatccttgataccaacagtacatttccactcaccattctgtttctccaggcaccccttctttgtagctccaggtagcagtataaatatatgtcagtatacagtctttgtcttggactccagtatttcattttttgtataataattgcaaaatgaaactcttatgtacagtgatattgatagcaatgaagtggtgttggtctttgtagctttctactttaataaaagaaaatatgcattgtatctgatcttagtatgataatgtgaaatgacagttcatgtttatgaaatacttctgaatgacaactaaatattttggttttttacttatattttgaatgaaatgtgtagaacataatttagttcaatgtccaattaacaaacatattaaacaatttaaaatatttctgcaacataatagtactcaaatttcttgtatacccttcaccaagattagagaatgataaagattcttcagtctttatctgcatacttacttgtttatttcctattacaagaacactttctccttccaaaccacagagcaggcatcaaaatcagtaagttaatatttatccagtattaccatatgtagtcagcttggactaccaatagcaaaataccacagactggttgcttaaacaacagaaatacttgtttctcaaagtgctgaaggctggaaagtcaaagatcaatgtatcaactgattcacttcctggtgaggggtctccctggcttgtgacatctaccatcttgctgtggccttacatagattggagtaaatgagctcttatgtctcttataaggacaccaatcccatgagatcaggttcccacccttatgacctcattcaaccataattacttcctaatccaaatacagctacattgaggggttagggcttcaacatatggattttgggggatatatattaaattctttacatcatgttattcatggactctacataaattaccccatttgtcccaatcatttccattttagatctaggatttaatccaggattactcgttgattttagttgtcatgcctcttcagtcttcttcaatctggaatagttgccagtcttttcttgtctttttctttccttttttatttttatttttatttttatttttgagagacaagatcttgctgggttgctcaggctggtttcaaactcctggccttaggtggtcttggtctcccatagtgctgggattacaggcatgagccaccgcacccagccttatctttcatgactttgacatttttgaggaatacaggctggttacgtgattaaatgtgcctcaatataggtctgtctgatgtttcctcatgtttgtgaccccttgacaggaatatcttagaggagatgctgtgcttcaatcagtgagtcctcttaggcatcacatgatctcaatttattccgtggtttcatgatgttaacttctgtttctttaagattgggtctgccaggtttctctgttacaaggtgaattagcaaatatgtcacattcataaattaataggcaatgtgtgttttgtggggagaatctttgtgttttgtagggagaagctttgagactgtaaatattctgtttctcatcatattttctcctgccagatttctccattgatgcttcttgtttgaatctgttatcactgtgatggatgccaaatgacaattttctaatgttatcagtccttctagatttattagttggcattttactgtaaggtagggttttccttgctataccatatatttcttgtttattcgtttacatcaatatagactcatgacttcaaattttaatcaatttattactattattttttaattctgatttcaaattttcttagacttagccaatagaagcccctttatgacatgtttccatcattctttcatcacttccttattttctggcactacaatgtgccatgcttatcttgtattttcctgacctgccttggaatcagccttctctgccacgaattttggtttctttagtggaaagtggcatttagaaaaaactctgagcactagaagtgttcattactagcctctctcagcagagaccctagaaaatttttgtgtataaacaagtgtgcatatgtgtgttcaacagcaggaaatctggctacctttatcttcagtgtatgtacttacttgctcaattccccccatatgtaagcaaattactgtggctgaaagcttggccctagaaaagtgaattcatctctgcctggtatgtcagcccaaagctgagtattaaatatgctgcccactggacaccatccaaacactcagcaagacaaaagtgacgaggaagaaagaaagagaaaagtgtatttaggaagttcagctccagacattttagaaagggtaggaggaaggaggaaaggccagttaggaagtttggttctagacacataggccctttcacctacccttttcccaagctcagcgcatggataggggaagcaggcttagaatgatgagttaacttgtccaagcctaatcggttgggtagtggcagagctggagtttaagcctggattttttctgactccttacaacttgctatttttactgcgtcttgtagaaagcagctttgcaacggatgacaacaaaacaacaacaaaaacactgaagcctttcttttctatattaggaaatatttctttacttttgtctcaggtaaaaatcatcattaacgtggttagatgcctatttgtaagatggcatatttgaagttatttctaagctagaacaaacagcttagacagagttgagcatagtaggattggggtcagagaccgaggttataacctggatacaaggagttcttatgatgatgaaaggtctgtcaatatgcatagatacaataacaatacaacattgggagatgctgaaatgaatatttttttctctaaagctttaaatgaatgcataagcctgggctgcaatttttgtgagtctgagtgtgcttgtaataatacataaattgttacgataactaatgccaaataatggattataccatgaatggaatgagagctcctcagggcagggctaatccaaccctgttttgtaggtagaggtgttaattacacattttaaatatcaagagctggactgacatttcagatttgacacctttaatttgcaacattattcttcagcaataaacgttaaaccttgtaaactctttctggttagctataatcatgtccaattttatatattaggtaaagtaagttatataagttatttttcatataagccattttgatattcacataatgttttcttatctgattattgatttttaggctttctatggattataaagatgtattattttaaattttggtatttttaatccataacataagttaaggaaattgggacttcagtcttaatatggtggtcgtcactgaactgtattttctagtggttttcctgataaagctcctgaatccatttaacgatgtgaaatacctaacaataattctgacaatactcacaactgtttatttggtagctatttttatcacaatacttgtatctaaaagaataagaataatgtatttgaataaatagtaagtacaaatatatggtgtttgcttaagaaaaggcagggtaatcattgttttccaattagtgcacaataatgccctgaagtcgtctcagtcagttttgataccctagtttcttattttctggcagtggcctctgtgccatctttttgaggaactactccgtttaaaagctcttgattaagtttatatgattgacagataatgtgaaaggaaaacagaaatcatttatcaatagaaggcatttattaattcaagtaatgtttatcaagatcagggccagcttcatgaaaatatgacctgtgcagtcacacaaggccctactcttaaaagggcccctcacttatgatgtaggacatgcaagcccccaaattggggcttagcccaggagggttcttggcttggcctagaaaagaattccagggcaagctggtggtgttaaacagcaacttttattgaagtggcattgtacagtaagcagcagagagactgcttcttgcagaaaggggctaccccataggcactctgcccagaatagcagcttagaggcagttttgcaaactcatagttatacccgcttttaattatatgcaaattaagggacagtttatgcagaaatttctaggatgagtgtggtaatttccagttcatagggtcattgccatggaaaggggtggtaagatctgtatgttgccatggcgatagtaaactgatgtggcacactggtggccatgtcttctggaaaggcttctatccaggaactttttagctgatcctcaggttcgttccaagtcctgattcctaccccacttagataagccctgtgtttgtttaatgctctactgtcagcatcttgaaattattttttgtttttgagacggagtctcactctgtcacccaggctggagtgcaatggcatgatctcggctcactgcaacctctgcctcccaggttcaagtgatcttcctgcctcagcctcctgagtagtagctgggattacaggcgcataccaccatgccctgctaaaaattcttaataattatttaacatggggccttgcattttcattttgtattgggccctgcaatttatgcagccagtcctggtcaagatgtaaatagatataaatatagatagagatgcagatacagatataggcacaatattatatctcaaatgcactgacagacagtctcacatgattcaggccaaagcacagtctaattacgtgatttaattatgtgattaaaggcaaaggcagaaaactagggaaagtacaaaagtggagagcctttagagcctttacttttaacctttagaaggttaaaggtaagagataaagggaaaggcaaattcaggtctcctgagaatagtcaggttaagtgaaatatgatcaaaactccaaacttgctaccatagcccataagaccctaggaaatccagaccctgcctacttctctaaccttatctcctaccactctctccctgttcaccacactccagttgcacttctttcttttctttaaacacctcaagtttgttttactgccctcagaccttttctctgcctggaatgctttgtccctcagcttttttcacagatgacttattatttggatcttagctgggacaccctccccagtctaaattagcccttctctccttagtcacatttgctatcacctttcaatatctgaaatctagttcatttaattgtatcttttttttattgtttttctcccaccactagaatgtaaataccaaaagagcaatgatcttgacttgttcaccataatatcacatgcccttagtgttgtacctgcacataattgtactgagttaaaaatttggtggatgaatgcatgaatgaaagcaaacagaaggcagtccggtagcctaaggaaacttctgagagcagtgagctgttgtgctgatgaagactcctttcaagaagactaagactttctttgaagtagttttctgatgtttcccactgagttgggctgtgtgttacaggcagatgcttatgcatcctgaaataggaccaattgtcccatagaactgatattaatcatttctttgaataagcacagaaattgattctcccattgttaaaacttgagaaagttaaatttgtcttatctgagttactttctcaggaaaccaaccatcaggcctcccagatactatcaagaaactgaaacttaccagatcattgcatctggacaatatgataccagacccttcagccatcatgactgccttacccaggggtacccagtccttaggctgcagactagtagccgtccatggcctgttaggaacccggccagacggcaggaggtgagtggagggcaagtgggcattaccacctgagctctacctcctgtcagatcagtggcagcattagattctcccaggagtgagaaccctattatgaattaggcatatgagtggtctaggttgcatgctccttatgagaatctaatgcctgatgatctaaggtggaacagtttcatctggaaaccatcccccacacccccatgcgtggaaaaattgtcttccacaaaactggtccctggtaccaaaaaggttggggactgctggcctaaccaatcacttgctacctgttgaccaactcctcttccttacccctccctaattcctgttttcccacacatacttacattttttccctgccatataagcccctaattttagctcgtcagggagagggatacaaatttcccatctccttggctgcggcacccagttaaagccttcttccctggcaatactcctttcagtgattggttttctgtgtagtgagcaacaggacctaaaccgaacccctggcattttggtaacacccccaagacaaatgagtagcatttctgaactcgttagattcttgaaagaaaaaaacatgcactagtaaacagaatattgcctttgggtacagaataaaagataataaaatacagttggccatcagtatccgcaggttccacatacacaggttcaaccaatcacagattgaaaatgaacattaggcctacaatggctgtgtctttactgaacatgtacacactttttcttgtcatcatgccctaaataatatagcataacatatttacattgtgttttgtattataagtaatctagggatgatttaaaatataggagaggatatgcataggttatgtgcaaatactacaccattttatatcagggacttgaatatcttctaattttggtatctgcagtgtcctggaacaagttccctgaaaatactgagggatgactataactctttgatcttttatatattggtttcctgaaactttcatgtcatttaaaaatgatcagttaagtttagcccagggaaaatagtcattcctgattttgccaattttcttaaacaaccttaggattatataaatagctgatgttatcttgaggaatctctgctgtgataaggtataaaacaagttaccagtttctaaatgctgtcatttttgtgtctcctcaagtataatacatccaactttataggaagaaatatttacatttttaatattagctttagtgaataaataaatagtaggcatttctaacttgtcagtccacagaaaccagacagattatttactgagcagccaacatcattgtgccctcttcctcttttgaaatgaccttaatgtgaaatgtcactacactagtacacttttccctccactctaatccctcccaaatgaccaactgcagcctaccccatcccattcatgggtcatactgatcttagaggtggacgtatattttaaaaagaaaatcgttccctcaaaaaacattgggagacttgtagtttaataagcctgccataaaatttttgatttgtagagccaagaaagaacctttaaagatcattttatgaatgattttgacatcgtacatatgaagactagggagcagagtaagtggctgctcaaagtcatatgtctagtgggcatctaccctctggactggtactcttcccaatgcaataaaaaaaacatgaaatatatgtactatgtaatatgtactatgagcttctttgctatgagtcatctttctttttaaattatagcagaaaataagtgtatttatttctactgcctgtcaatttgcttacaaaggagttgtcataagaagttatttaaaggatgtagctgaatttctttgtgaaacaccagatctatgttattttctcttttaaattgcaacatttgttgataccttagcaaatgaagatgaaagaagaaaataacataaagggtaaaatgacattaaaggagacataattagaaagagctgatatttagatgccaagaaggtacactggaacatggtaacttttttgatatttttccttctttatccaaataatatatcaaagtatatatccttgttgtaagccattcaaaaaataaagaataacttaaagaaggaaataaaaataacagtaaataaaaatagtagttccaagtgtcagttattgtttacattttatatttttaataaatgtaattttaaaagatgaaattattctacacattctgtttttaccttgctgttgttttttacctagaccatttttgatgattacatagtattgttttacatgattatactgtaaattatttaaccagttatcaatttttacatatttttgaggtttctgatattttataattactaactattctgtaatgatacttatgaactaacagatacttctgtgtgtttgctgaatcactccttgccaaccacaaagtattaaaatgaactggtatcctgcctttggtagacaaaccctggatttggattttcccccattgctgatatcccatttccccaggtgcccctcaaaatgtttttgttctctcactttttctaaccctctttttctttattgttcataattgtttattaaatgtgctgaattttcacttttaagggatattttacaaaccatacctacctagcatttttagatacttctgaccccagccacatcttcctttttgaacataaaatcaaggagtgccctatgtgtccttattgctctatcaggaatctggttactttatatagtgtgtgaacccaagaaagcaattaaatctctcctttatgcccctggaaaagctaacagtgctctctgctaagaaaaagcctcctttagcccctttcttttcttttattccctcactaacaatatacgcataagccctcatactcaatatgaactgaaattctccaatcagtctacagccataccaccctgaacatgccagatcttgtctgaaaatccccattttatcaagataatttagtgtatctttagagacctctagatggccaatagcttctgacaaagcacttttcttatgagctttttaacattattatgaagagactatttggacttagtattaaagcaacaaatcttgccttcactggtatcatactgtccttccctttccttctggtgatcatttcactttagacaaacaactaaaaagacattagagctcttgacctcacagctcattaaatacttcaaagtaaatataaaagtactctggcaaggaaggatgggaattaggcttttgcttacaaagcctttataggtctattctagatgtattattttagactttgcaatgacagcttaataaatcatctacttatttgtttgtgacaggtgtctgtgtgtgtgttgttaagtaaaatgcaattgtatgtaaaccaatatattacaattacataatttttaacaaaaatataacacgtatgaattgtgcctggttttttcttccactgctttattagtaacatttttaaatgaagacatataatcatataatcaagcagaatttggggtgggagggaaattattttctagaagatgaaacacttaaagctttcccaaaatattttttgttatttacaaaatagtggatttttaaaaggcattaaattaacaataaaaaaaaataatacctaggaattaactaaataagaaatgtgcagctgttaccagtgcagggtcttgactacaagtcgtccaggttcttggcaatttgaacaaagatttggacaaaatgcacaaacaaagcaaggaaagaatgaaacaatgaaagcacagatttactgaaatgaaagtactctccacagagtggaagcaggctgcagcaagtggctcaagagcgctggttacagaatattctggggtttaaatttcctctagaggttttccatcgtttccttggttacaccctatgtaaatgaaggagtggcctgcagctaatcagaagtactttccatttttcatctgccatgcagtgcaaagggagtagcctctcatccttttgtggagaggtagggttttccttttgattcagttctaggaagtcagcaccaatcagccttaggctccctgcctccagaccctattctcctgcctcacaaggtcactgtgaaggcaactttaaaacacagtagaaacaggcttgtcccatctgtggcccatgggctgcatgtggcccaggacaactttaaatgtgttccaacacaatttcgtaaactttcttaaaacatgagatttttttgcgttttttttttgttgttgttgatgatttgtttttaagctcattagtcaatattagtgttagtgtatttcatgtgtggcctaagacaattcttcctccaatgtgacctggggaagccaaaagattggccacccctgctatagaagttcacaaaagaagatttgaacaaatagaaagtgataccaaattcctggataggaagactcaaaataacatcatagataacaatacttcttcaattatttgtaaatttagtgtgattcccttacaaatagcattgttttgttttttaaacaagataagaatactttgaatttaatgtgtaaaaataaacaaccaaaaacaaccagggaaacttggttaacaaaagaacaaatgagagatgatcggccttactagatatgatagtgcctctgtaattaaaatagaatggcattggtgtacaaataaacaacctaaccaaagggccagaataaaaattacagaagtagacccaaacacttaagagattttgtatatgatgaaagttgtatctcaaaatggtggggaaaagatttaataaatgtagttgagacaatggggtggtcttcttgggaaaaatatgagttggatctgtgctttatattatgatggattccaaatggatcaaatatttaaaaatgaaaccataagagtactggaagaaaatatgagagaattctttataactttggagtgggcaaggagtttctaatttgacctaaaacctggaaatcataaaagattcataagttagccacaaacttttgtgtaacaaaaagcccataacccagaagaaaaggggggaaaatatatttgcaattcttaatgctgatagagagataatttctgtaatatttaagaactcctagaaactgaacagagaaagacctaacgataaatagaagaattggcaaaagatgtaaaaaaaacacagttcacataaaagaagatactgaatggttcttaaagcataaaaaaactcttctgcctcactccaactaccttgagataccattttcatcaataaaactggcaaaaatccaaacgttatttagtataccatagtggagaaaatttagagtaacaggcactatagttggtgagatagtaaattagtacaaccctgactgagggacatttggcaatttgtatcaatttcattatggcatttttgtaatttcattaaattaatatttactataatttctggcagaagatatttttatcccttttattttctctattttttgtccagtgaaaagaactggttttattgaataccatgtctgagaatataaattactaagtcttactcaaacaccatatgcgttatggacagatttttttaatctgatgagatttctaattacatgggatgaagattgttttaatgagatcataagtaaacagacttatcaaagaaaagctctaatttaagttttctggaatagattcatctttaacaacaagattttttttctccaatgttccactttctctgtttttgctgacctgtttgcctcttatgattcaccaaactagaataacaatatatttgtcttcaatgttcatatttttagtaaaagaacagaatgttttccttctgtgttatttattaattatgggaacttgagggtggtttgtgtgtgtgtgtgtgtgtgtgtgtgtgtgtgagtgtggtgagtatgtgtatgtaacattactggaatccctgttggctgagggccttgcaagtttgtataaagagagagtaggaagcaggcaaaggagagggaaaggacaggcattttatgatatttaaggacatgacaatgaataccactgttgggatggataagattaaacccacttctgtttaatcaatagtgtcatctttatataaaagagataacacattaccactccttactctctcattccacttttttggtgaatcaaactttttacctgaattaattttccagcatactgtagtagaaacaaacagcttgggtttggagcaagaaagagcagggttcaaactctactttacaactagcctgtgacaatggacaagccacatactttctgtatgacttatttttcttttgtataaaattgggttaataatacctcccttgtggggctcctgtgggaagaaaatcctgtaacatggtgcctggctgtattcgtgtttaatgatgacttagatcccaggttacgcagcctttctccatactccctgtgtatactgctgtcagagcacttcacccctcctgatctcatctcatctttggcacttaggacactgccagcatgttaagtgaatggaataaacacctaaattttattttaaaccttaaaatagaaatgttttaaaatgtcttgttaagtatattatatggaatctattgtagagtagcatttatacatcattaggcttgaatatgttcccaggggacctggggacctgtgtccagttagaacaactcaccaaagatgaggatcttactcactttggtaccagtagaaagactgctcagtttttcacatctgcttttgagcaaggtgttactattcttaccttacttaataggaggagatgctaagaggttaggcaatttttctaatgccatattactagcccatggcagtattgccatttgaactctgcatttcttttcttttttttttacttatgtctagtacattttccacaatattaaataaatacatttggaatacatagtgtgtgaaacatagtgccaattaatggtagttgctattattgttattatttgagaatgacctctcttgaggtttgagaatctgctccatgcgtgtatcattaaagcagtctataatgaacttatgcaaacttagttttagaattgaactctcttccatgactatatcagtcttgtggacagctgcagtggctcttgactctgagagactactagtcaaagcccaaggattttaagctcctccctcaggtggcccttcttttcctcatgggtactgaataactttcttacttcatggtcattggacttttgctactgacattgtggcttggtggcttcatttttctggctgctgttgatctgcatgcttccactgttcctgttgcttgctactacagagggcgtgaaagtcgaaatgtgtttttaccacccagaccagtgaatacattgctatgttagggtctcaaaagtagttggctctgtgtttggggcccattcagttaatttacggaagaatctatgatttcttctgcatacagtggttgaagaaaagataggatgatcctcttgattttagtctttaatctctcagttttgttctccctagaactttttgtttctgagtcttcaatttctctgggactctctttttcttttttctttttttttttttttttttttgagacggagtctggctctgtcgcccaggctggagtgcagtggcacggtcttggctcactgcaagctccgcctcccaggttcacgccattctcctgcctcagcctcccgagtagctgggactacaggcgctgccaccacgcccggctaattttttttgtatttttagtagagacgagatttcaccgtgttagccaggatggtctcgatctcctgacctcgtgatccacccgcctcggccacccaaagtactaggattacaggcgtgaaccaccgcacccggccagtttctctgggattctttaagatatgttcctcctgcacctgtttcctaggccagaattttgttgtgaatcagttgctgatgtgctgatatattgattctcctcagcttttcagaggatatcagctttctttaccttagtatgccatacaaatattaccattatgtgtgtgctcagacttaaaaaatgtttaagaagcactgccctaaatttcagcttcttcacccctcttttaccaattatcacccaaccatcttttttttatcttccaaaaacttgttcaaaattttcatccaatggctcttttcccatttactcttcaacattctgagtttgtactgtttgtaactctttaccctaagactttcatattagttggctcttgggagggaaagaatatatgtgccaaggtcaagatgccatttttaactgaaaatcgggttttttaaaagtttaactttattaagctataattgatttacaacaaacagcagatatttaaagtgagacagtttgttacatttgacatgtatccatttgtgaaatcatcgccacaatcaaggcacctactgtacctctgtagaaactgaggcttggagaagcccaaaatttcaaatgagaacccaggcctatcagatctcaaggtccatcctgtagactataacctgagttctagttaggagaagaaaaacaacaacaacaacaacaacaaaaacactatttttcatttgtgagggaaaaccacacagtctctgaatctagctcctcatttcttcaggaagagagttgtactaaatgatcctagtgtctttttcaactttaagttcctttgcttcattcattgttcttatgaaaaggtggtaaatctctgttcaaatacagtttgttttaattaaatgacaccactattctctgtaattttcacagtggaacaatataagacattaaaagcatatttttttctcttcataggaaagccatttaagaagttcctggaataatattagtcagagtaatataggatctgcaggaagtgtctcaagatagttggtaagataataagaatttagtttttttcaaatgcattgcataattatttttctgactataagcttcgtagccttgtactcacaggagacattttccttaatctttaactattatgtgatttttaagcttaccaagggtggaagttgtaatagttacctaaagcttagctgtatgttcacttttgccagaaaatgaagatgttatatagatatggatattcataatgatatagacatagacttatctatctaatgagctgtctttacacttctcggatgttattgtcaatgataaaatgccataacacaaaatacatacaatacatctaacatctatatacaggcttatattatttatgttccaagtgtatataatgtttttatgaacagttggaatcaaatttgacagttctaagacctgacaatttattttctacttcttcaatcctaggaaaagaagaatttctagactcttcatcaagatcttcatttatacagctgttaaatccaaggctactttggtgaaagcatgaataaaaatacatctactgtagtatcacccagtctacttgaaaagtaatttttaagtttaatatgttttgaaatatagtttgaaatatgtaaactattaatgaacatttgattaaaagtttttttacatctagctctctaatgtggtctaggatagcagcaatgagtagtgagtaaagtaatacgttgaattacctttcaatgtaaatcagtgtatagaacaaaatctgcattctcttttaagtcatctgtgcaggcacggtagggcatgcctgtagtcccagctgctcgggagactaggacaggaggatagcctgaagttgggagtttgaggctgtagtatgctatgattgtacctgttaatagccacagcactccagcttgggcaacatagcaaaactctgtctctaaaaataataaaaaatagacaattgtcaaatacatttttaaaaactcttttgtgagatttcttttttaaattttgatttttaatatctagaatattttataattccattaaaaaaatttgataatatatagattaactcttgctgactaacaaaccaccctaaaatcccttaaaacaataagcatttattttttctcatgattcagtgggttggttgagcagttctgctctataccagataatgtaggatggcctcatttacatcttgtgaggcctcagctaggaaggttgaatggcagaggtctctgtagaactggtctgtcattcttcaggaggctggctcaagcttttcacatggtagcagaagcacaggtgttttccaaatacccagtttcctcacatttgctggtatcccatgggccaaagcaatttaaatagccaaatgaaaattcaaggagtggagatacagactttgcttttagtgaaaggaagcagtaaagtcacattaccaagatgcatgcagacaggaatgggaggaattggtggccattttgcaaacgtaaaacatacctttaacaaggcatattaaaaaaaatcttgctgttattctagtcttcactgtgtgccctcattccctctataaaaagttgtttttattcttggtccttttgtagtgcttctttttggttaagccaatgcatatatataaaaataaatatacacatatgtatgtacacatgataattatatatatttggattccactccccagaatattcttaagtaaaaggtgtcatgtatactgttttgaccttggctttttgttttaatgtatatcctggtgatcccttcatatcagtttataaaaatcttccttgttttttgttataacttgtttttgttatattccttgtttttgttataactgcataatattctattgtgtggatgtaccatggtttattcagccactatattatggatgggcaaacaatacatttgcaatttctggtgaatacaaattatgccaaaatgaataacctagcatataagtcattttctattttttgccagagtatctttgggatagattcctagaaatggaattgctggatcagagggtctttttttgttagaggttaccaatttatctctttagaagttgtaccattttgcattcccaccagcagtgtgcaaaaatgcctcttttcccatagctttttcatcagagtatgttgttgaagttctaaatttttattggtctggtaggtgagtagtagtatctctgcagttttaacttgtaattctcttattatgagtaaagttgagcagaactatttttaatacttaataggaaaaaagagtatataatctaaaattttaataagagttttaaaataaggtcctagtcatgtatgtaaattttatgctgctatgaacatataaatttatgtttaagaagaactttcaacaacatagacattgcttataataattctgggtaagaagaaaaacaagatctaaaatggtttaagtagtatgatagcaattcagaaaatatatggatattaattcagaaaatatatggatagatttatagagaaaacgtattagcagcaataaactgctgtgttaataatactttgttgggattagaaaagtaagatcctatactgaaacaataatatatgctggagattgtttgtgcccccagtgaaggacattcacatttggagggtttaagagttagtggagagatctaataaggtagcttacttccctttcttaccttatctttcatttctaggctttactcgtttatgtttttgcaatctaccatcctgtaaagaagggatttattggccaggggcggtgcctcatgcctgtaatctcagcactttgggaggccgaggcgggtggatcacttgaggtcaggagttcgagaccagcctggccaacatggtgaaaccctgtctctaccaaaaatactcaaaattagctgggtgtggtagcacgcacctgtaatcccagctattcaggaggctgaggtgggaaagtcgcttaacctgggaggcagaggttgcagtaagctgagatcacgccactgcactccagccaggacagagcaagaccccgtctcaaaaaaagaaaaaaaagaatgaatttagggtgcattttggacccttggaccctgtcctctctgccttttttctagctgattgactattgccctagaaaccagataggccttcccaaattagagctgaattcagtatacctgtgatacagctctaaatgatgttatatatggagagcaaaatagtcaaaaacggagttctatgtgctttttaaaaaaatttcttctttttagaaattatttttttgaatgcaacagttttcttaaagatattcttagaatttctacggcagaagctaagaaagctttttctaaaaactataatcatgtaagatatgaagtaactctttttctttttgagacagagtctcgctctgttgcccaggctggagtgcagtggcacgatcttggctcacagcaagctctgcctcccgggttcacgccattctcctgcctcagcctcctgagcagctggtactataggcgtccaccaccgcgcctggctaattttttgtatttttagtatagacggggtttcactgtggtctcgatctcctgacctcgtgatccgcccgcctcggcctcccaaagtgctgggattataggcatgagccaccatgcccagccagaagtatttctttttttaatagtagtttcagttattcaatgtatttgaagatagctggaagtcctatattcaacaatggctctaacacaacaacaaagtagattacatatcacattttgcctctgaagtaagactgactgggctcacacttgggccatcaagttaacctatctgaattttgggtcttttaaaaaaataagggtaagaatcttaaggattttataaatattaaattaaatgtcattatttaggtgttgtttagcacagtacccagtattagtaaacaggcagccctaaatcttatttcaaacttaattcaagttttgtttgaccagtaaaagtctctggtctgacccaggtattcagaaatgcaacttggatatcccttttgcaggatgttttgtacagtcccttcttttcaaatggcattgcttttatgtctgacagaaattacagttgaaacaagtactttttaccaagaaaatattctttctaaattaaaaagataaaatttgagattcaaatggaagtcatatttactttgctttaaatggccacagacatgtcttttaaagctacttaaaatatttagttttggaattcttcaagtagtctaataaccaggtaaaagcaaatcttttccgtcgcctttaatacatttttgtcctactccaaagaaataagcattatcattgtaaattcttttgtgttttggatgttttgtagggaaaattaaaagtatatgcaagcaaactcatttaattgttgttatgtcaccatactttttaaaaatgtcactgctagtaagtactaagtattttgggttgtctagatcagaggtccctaatccctgggccacagactggtagtggtccgtagtctgttaggaatcaggcgacacagcaggaggtgagtctagggcaagtaagcattactgcctgagctctgcctcctgtcagatcaatggcggcattcaatgctcataggagcatgaaccctattgtgaactgtgcatgtgagggatctagcttgcgtgctccttttgagaatctagtggctggtgatctgtcactgtctcccctcacccccagatgggactgtctagttgcaggaaaacaagctcagggctccccctgattctacattattgtgaattgtataattattttattatatattacaatgtaataataaagtgcacaagaaatgtagtgcatttgaatcatcccgaaaccatcacccctctgcaaccccattccctctccccccaccttggaaaaattgtcttccatgaaacaagtccctggtaccaaaaaaggtgaggggttgctgctctagatctcagattttgatttaataagtagtttaaagaaaaaaataggtgcagatctctagactaacctgtgtgtgctaatttactttatcttagggatcctgcctttcagatgattacaattgccaaggaaacaggccttggcctgaaggtactaggaggaattaaccggaatgaaggcccattggtatatattcaggaaattattcctggaggagactgttataaggtaaaaatatgtcccatgcccaccaaaaatacaaacaaaaagacccaccagtggtaaagtttattttttcttctttattagtgaatttatatccactgtgaccatacctcagtgaaaaatacaaaggaattagaagataagactattgccctcaaggagctttaaactaagaaataaataggttcttcttctatgaaaataatagatatttctgactgtaagataaggttattatttttaaattacatgctgttcaacttttatcctgtatctgattgagagaaattatatttgatgacttgttatctttctactactttgagtttttattaagttggatcagtagaactttaattacattcatttagcctctactaaatgcaaaacaaaacagaaacagcaaacaaaatctaatttctgaattcgcagttcttgtagcttgagctaatgagttttatcactcattaaaaccagaaaatgtctttttttaggaattagaaagtcttactctcctcttcagtgtaagaaatatataatgagctccctttcactttggttggtaggaagctcagacccaaatttgaaggacaaccccagcagtttaacaaactagttactatatttaaattctcattcttcttggatttcatttgctgtttctgttttactaaagtgattatgtgtcattttttgaaaattgcctccatttgattttggagagatatcagatataaagaatttaataaaattatattaataattaagaattaataaaattaataaaatattctccatttgattgactccatttgattttggagagatatcaaatgtaaataatttaataaaattatattaataattaagaattaataaaatattctattaatatcaagctatatagcatgagaaaggatcttcttattttgttcttgttgtttggttaaataaacagtcctactacttttacccaccgcccatatccctcccccaccactgcaaacacttgtttactaagcagtttatcttttcagctggatttttttgtcttgttagggaaaaattccgttttaccaataacttccaaaatagttgtagtactttcaattgttttatgcttgttcagataataaggcatcttttaaatatactttccgagttctaagtgttatagaggccaggcatggtggctaatgcctgtaatcctagctttggggaggcagaagcaggaagattgcttgagctcaggagtttgagaccagcctgggcaacgtagagagacttgaattctattaaaaattaaaaaaaaaatcagcccggcatggtgttgcatgccagtagtcccaggtacttggaggctgaggtgggagtattgcttgagccccgaagatcaagagcagtgaggcatgatcgtgccactgcactccagcctggatgacagaacaagaccctgtctcaaaaaaaaaaaaaaagtattatttaataagtttaatggcataaatttttggctattaaatttaaattattaaataaatatttaaaagctaaatttaaacaaattcaaaaaaacaaaaaaatgaattttttcttccaagaattgaggtgttactttagtgttaaagctgagaggtgtgtgtgagtgtgtgtctgtgtgtgtgtgttcaatatagtaaggcatttcttaaactacacttgatataatgcaatagtagatcagggtacccaacaagtgataagaatttgcttcctttttttttttttttttttttttgagacagagtctcactctgttgcccaggctggagtgcagtggcacaatctcggctcactgcaacctccacctcccaggttcaagcgattctcccacctctcagcttccctagtagctgggattacaggtgcgtgccaacacacctaactaatttttgtatttttagtagagacagagtttcaccatgttggccaggctagtctcgaactcccaacctcaggcgatccatccgcctcagcctcccaaagtgctgggggtacaggcatgagccaccacgcctgacctaagaatttgcttttaagacaagcatcaatttgtgcttgtttgttacgatgaaaactatttggagttagagtaataagttgatagcggtggtgctgaatgactctttatcttctgtcagtgatagcagattaagaaattattcttatgatatctactttttcttgttagaattttactgaagtattaaaaggcaaaattttctcattgactatattctctacttagcactagagggcagcacagagctattaatgttcttcctacctggtcatatctgaccaaggaaaacaggcaagatagaaaaaggtgtaggagaagaggaccaggggtgatggctcatgcctctaattccagcacttttggaggcccaggcaggaggatcccttgggcccaggagttccaggttgcagtgagctatgattgcatcactacactccagcctgggcaacagagcatttctaaaaaataaaaaaatttatagaagtaattttctagtgcttacattatttttaaatattttctcaagatggagagctctatgcatatgcatattcttcaaatacaaaattgatataactttattttacaacaatgtattaatacatttactatattctaaatactgttttaacatgttaataaatttctagtctgcacaaaatttctacatagtagaatctgtggaataggaaacacaaactcataaggttatcttaatgaagttgctgaactgagtaactgttaatattttttaaatgcatatgaatgctttaactttctgtaattttgttttaacattataatgtttcataattaacagtataggctatctcaagcttatagctagattatatttcatttatattttcaaatcttccaaactgtaagggagttattggaacgcagaagaaattttctttaattattcatggtttgccaccacccaccccaaaagttttcctcctggaaaatatgagaataaaatactggtttagtagaagcaaaatagtatgtttctttgaaaaacatatccagagttcaaatatgggatattatgaatacatcttttcagttcaagcagaaccaagattccctcagctctaagagctagaggcaccctataaattgagaactactgtattaattgctaaagttaaggaaataagagagctccaaggccctttcactgtgtcagctagtcccatatctatctggggtcaatcctagaccctttttctggccaagacactcctttaagcttcatacccatattcagttccctgatcaacatttttacttggacctcttaaaggtatctcaaactcagcatttctgaagcagaactcatgacatttacatcacaccatattctgctcaactcttcccaaacagagtctcttccagtttacctagtcttggtgaatgacagcttctagctacacaaagtcagaaaatttaacagcttcctatttcaactcccataacactgttcaattcattaacacataccattgacttttttactctcgaaatatctcttgaacccatcagtcttcttgatctttattcttatcactggagcttaaactgtcatcagttttgaatcagccctttcagtagcatcgtttgttcttatgcaccatacctatttccctcccaacctacatatcttactaatatttggttgcctgcaaggttccatatagtgtggcttctgccctgtccttctctgcctctccatcactatgcttccagagtagcattttctcagttcctggaaggggcgaatttctcttttttttttttcttttccatctcatatgctgttcccttaggaaacagcactccatttcctttcccccattatttccagttatcaattcaaagactgctgcctaagggttgtgttgcctgctttcccccagtctaggctaggttttatttttttctacatatgctcctaaatcccattcctttcctttgtgtcacctacctcagtttgcaatgatatatttatatttatgattgtttaatcatctctgcctgaaccacaagacagtatgtttcttaagggcaaggatgctatctgattttattcacagtaatattgttagtccccactgtggtgcctgacacatacatacttgctcaatttaaatttatgaatgaacggtcccgtagtcattttctcacatttctgaggattactgatctgcttatttacccttccactggcaccatttgggctccacaccaaggtacttcctccttgggcctttgtgtcagatttccgacaacactttaaagttctcaaatgttcatttttatttctttcttttgttgctggtaacatagggaaagcagacagaaatcaaaatcctctcttcaaatctgatagtatatttcatattttcttcagttggttctaagatatacattaaaacatatacatataagctatgcatgcacacacacatatatataacatgcatatatcggtatgtaatatacttatgagtgtgtgtatgtacgtattttttcctcttctatctctgaaattataggtctcacagtcagtgtcatcatgtaatttgtggcattgaagtaggacatatttaactttcagaggaaatctgttttcatgcggagcatagcactggaaccagggctaaggcttttagataaatatcaggatcaggcctctggatggcaaactatgaagaaaccagtcccactggtgggagctgaagaagtagcagccaagatggttcgctttgcagtgtcactctctttattcctttgccattattatttttgtcatagctaccttaatttcctcagactgtttcttggccccctttaacctattgtggacttactgtgtacctagcactgtaccagggaaataaccatgaaaaggacagagttctagttatgcctaatgaaagaattggtgattctggcccactaaaagaatcattgcccctagactgggagttgctgatttagtatattctaatgtgagggcagggaaaagcagatatgtaaacataaggaccatacagagtaagtgcaatcctttaggtaagtaaaagtgctttttgagcaaaaagacacaacgattaagtaaatcctgggcaactagagaaaacttccagcagagatagtgtttgaattgggctgtgaagtttaagtcagagtttattgcagagaagtggcagggtggatggtggcattctagatgggaattcatatgtgtgaaaacattgaggttcaaaagaccatggctggtttgaggcacattctctgagagtagaatgaagaatatgctggtgtggaaggtggatgatgaagctagaaaaagtaagttgcagtaaatttgttgtgctgggtttgggatgttgaggagtttcaacttttcctaccagttggcagccatcaaaggttctcaatctaatgagtaatataattaaatttgctatcagtatgaaaattgtccacaacagatatggaagtctcattcacttcatcttatttaacacgtataatgtgctataatttacatatgttacttaattcttatagcaaccttgtgttacatatatttatccccattctacagctaagaaaatagaggttcataaaagctgaacaacttgcctcagttcacagtaataactggagttaaaagaaggtcaccatcagtctacatcttgtaaaagtacaggaaaggaatcttaaggcttacagaaggactattccttagtattaggtataatgagttagttaagtcagaattaggctgtatagatggtttctcataatattgaaatgtattatttagaaaactatataccaaagtcaatatagaaatgaatagtactggtcgtttttaacagaagtgtttatgtggtcaggaatatattattatttcaacatctacatgaatgtcaatgtgaaagaattcagatctgaagttcagcatatgaaagtgcttggcacattgcctcccatgtcaggtagttgctctgtaactgctgaattggaatctagactgtgtggaagaggtctcaacatatctctgaagttagtatcttcacatatacattaatccatctggggcagaatgcactcgaatgccagacttacaaaaatagctttgttttcatttgcaggttctgacttttaaacaggttcagaaattcacatgatcagctaagatcttattctaggaggcaaagaaaaaaactaactgctatgaatactttttagaaagaaaaaatatgtaaacaccagaagtcatagtcagaaggcattcttcttcttctcttttctgactcccttcctgccagaaaatgcagcttctatacatcagtgtactttaatacaagatgggctaaattgccttcatgtgaactttttttctgtactaacactgcatgttatgttgtctgactttgctaactatgtttaatcacatatttacataaaatcaaaaattttttttaaattatatatataacataaatatatataatataaatatatatattatataatataaatatatatatattttatatattttatatatatatatattttttttgagacagatttttgcttcattgcccaggctggagagcagtggcgtagtcatgaccttgacctcctgggctcaagtgatcctcccactttagcctcctgagtaactgagactacagacatgtgccagctattttttttttttttttttgaaagatggggtctaactatgttgcccaggctggtcttgaactcctgggctcaagcaatctttctgcctcagcctctcaaagtgttgggtgtacagatgtgagccaccgtgcctggcttatatatttttaaaaattaagttgactcttttggcttaagtattttaaataatgtttacatttcagtaggatagggtcattatgcatctagattatataatcttttacacactatttgagatatgtttctataaaatcctttcatgaatgttttatgtcaattttgttgttttcctatatattctttagtcagtgaaagagatagtacttcatgtctttttaaaaaataataatacctgttgttatttaggagtaaaataactgtgaatcaccattattacaaataatacagcttagatcaaagatcagtatccaagggatatattttagtagataagactttaaagaaagatgttttcttgaatttgtggaagttacttaagtaccatcaaggtgaaaatctccctttttaaccatataagctttttctgtagttataaaaataatggtttctaccactgtactaattaatgataaatagggaaataccttaggaactgtaaaagaagaaagcttatttttattttctagtttgaatgaaaagaaaagacaaaaactgggaaacttatctaacatatctaacaaccacattaactcttgttcctgatatgctctgtcttactcagttaggctagctgtgagcaagccaggccttagcaaaggcaacaccaggcagccagttagaattgtcattattagcaggatatggctaacaatatatgcacagccaactaggccttaatcatagggggatagcaggtatagtaaaaaagattatgctgaaatatgggtaggatcaatataattaaaatccttggccaggcgcagtggctcacacctgtaatccgagcactttgggaggccaaggtgggaagattgcttgagcccaggagtttgagaccagcctgggcaatgtaatgagacctcatctctacaaaaaattttgaaaatttaattttttttttttaaaaacccttgactaaagttttaaaaatctcaatgtgggataaatccacacacacattgaacagtttggtgggaggacatatgtaggaatgcagagaaaataaaataaatgagttttgtattgtgaaatatcccacagttatttggcccactttatcacagagtcagagctttatcagccccatagtgctcagtttttaaaacaggtcccttttcctggtatactggcctatgtcctacctaccatattaagaattctttaccacgtaaatttattcatgcaatacatgaaccattccattttactcataatatatgttaccaaaccagactttaatcaagagattttgctactgaggttgtctaagattttactttttactctttttgaaggcattcttcacgaaaacttttcattgctttaattacatcaattaatttttttttaaatacctcattagttcctttataaatgttactgtttttgttaggatggtcgtttgaagccaggagatcaacttgtctcagtcaacaaggaatctatgattggtgtatcatttgaagaagcaaaaagcataattaccggagccaagttgaggtaactatactatccatgagatagaatgagtcatttagaatgtctccttgaaagcagtaatttaagatgtattaagtactttataataagtattttttaataacatctgaaacattatcttggatttcagttgtactatattcatagcatatccataaagtgatttctttttagtactaggttagaatctgcttgggagatagcattcataagacaaaaatccgacaacattcagccagaaaatctgtcatgtacatcacttatagaagcttcaggagaatatggacctcaagcctcaacattaagtcttttttcttctcctcctgaaatactaatcccaaagacctcatccactcccaaaacaaataatgacattttatcttcttgtgaggtaagtcaggtaatcttaaatttctctatatatgcactccataaattccctatacatttttacattggttatgtacatatagaattatttcagtaaaattgttaacaaattaatatttctttgaaagatttttttctatttaaaatttttatgctgtgttttcaataaacatattttaagtcagcatgtcctgtgtccaggagcatgattggttagaaaataccagcatgacaaaatggttccacaaagatatgcctagatatcactcaaaactatgttaagaatgtcatatttggtttcagttggtttagttatttgccatttctgttctctgcttgactgaagtgaggccatcttcctttttgttccttagcttctttcccacacagtgaggctaatcccaggcatccaatctaagaaggtattgctccttcatgtgtgcatgctatagttcacccaagtagaatcacacaaaatggggaatttctatatcagaattaacatactcaattactaactgctatattatctgaacaaattacagttacagaataaagtgtgtattatttatatctgtgttagctgtaaaataggaaacttaagcttttagtcagtagaataaaattcatcaaaggtaacttcagtctctggtacatgctgaacagagacagagtataagattttctgtcagccccttatactttgtcacttggagctataatacttttaaaagacaagatgagtggccttatattttgttatccttggatgtggtagagctgaaagcaattgttacctttaattctgaattgctttgtttgaagatgcatataccaaaattttagaggtttcatatttgagggataattactttaatctctttaaccattctttttatgttaacatgggcttcaagtgacctactttagtaaatgacattgcatgttcctcattttctttcacagataaaaactggatacaacaaaacagtacagattccaattacttcagaaaacagtactgtgggtttgtctaatacaggtaaatacacatttaatttctatttcctgttttttatttcaattctctctcaatgaggagtgtgtaatgtgacttaagactttgaagaagggtgaattatgtctttgttccttcagtgaacgaaaaagtaaaaataatgtctttccgttgggccctgttaaagtatgacttttattagatatttccctgaacaaagagttgaagtttcaaaagatgcattgtcataacagtgtttatgaagctgtaataattaatgaattgtttaaatcaaataatggaaagtcttctataaagatcaagattaggttgccatgtccttttagtgcaatactgatgaggcatattaaatacacctttcggaaaacacattatagaagggagcataccttaagaaaagaaatgtatcttgtttttttggaagaaatcatatggatatcaattataaagggtgtcagtattgttaattcattattattgattcttaattaccataaaatgatttactgactttttaaaacaataaagcgttaattatctaagccaaatgtaaaataaagatttttatgtggctataaggtgcttacaggatcaatacgaagaaaaaaagccccctgaaattatctccaaaagttaaacacaacaatgataaaaagactaaacataactgaaaaactaattatatatgcctaattataaggtaaatttttacctgtatattttaattttgttttaatagcattatttatataagaactgaaaaataaggaagcattaatttaaattaaatagctaccaatcttttttttgagatggattcttgctctgtcgaagttccgcctcctgggttcacgccattctcctgcctcagcctcccaagtagctgggattacaggcgcctgccaccatgcccggctaattttttgtacttttagtagagatggcgtttcaccatgttagccaggatggtctcgatctcctgacctcgtgatctgcctgccttggcctcccaaagtgctgggatgacaggcgtgagccaccgctcgtgcctggctcaatagctaccaatctttacaggagtttatactatattccacagtagtttcctccgatttggggtggtatttaccagtgggttaatagcaatcttaagccatgagttatattaccttttacttagatttattgaccaactttatagcattattcctcttacataattaatttccagtctctgcatgtactgtatttattttaaactgggaacccttatgagaagaaaaagacaaatgaaacagtcatgagatgagcatcaaaattgctagatgatggaagtcagaaccctttattccttgatattataaaatattaataattatataacatgtttttaacttttaaagtaattgaactattcaatgcctattttaaccttttattcagtaaggttttactatgttatatgtgtagaatacagtacaacgggaattatgaagaaattaggatattttctgtgagatacttaatagtatattgtgaaataaaacatggggctaaaaattataattattgaaattaggaaacattctaatttatatgcatgtatttgtttatagatgtgtgtgtatgtttattttatcaagcagctactatttgcagttttttgtgttaatcagagcaggatatgggtggttttgttactctaaaaagcattctgtcttgtggatgaataacacatttacacaaattatgtaaagacatgaacaaagaggcctaaggaaggaagtagtgagtgctatgagtatggtataaggaaggcacagtggttaccaccaggctctgaatacagactcagtgttcaggttcttgctttcatcttattagctctgtaaccttgaaatagttacaagttacaaggagttgttatgaggattaaacaagatcttgcatgtcaagcacttatattgtaattagtgcatagtatatgcttactaaattttcctgttactaataatatggaacctatagcttagagtgtagctcagataatattctaggtcatgtttatagagcagaaggaaagcttccaattcttgattcaattttatgtcctccccttgaccccaaaaactagtatataataaggaatctgtcacaatatgcagaaattaagaaaaatttcttggcaaaagtcagacattatccaaatcttgaaaaaagtggtaaacatcaattgataactgaacacaggagatcgtttcaagttaaggaagcaccacaaataaaagcatagaactaaggatgagctagatgtcagatgattctaagagtcaggtgtgattagagcagagatcttgttaacaatgaataaactcaggtaaatttataccagtcgctataagaatagtggtagattttgtaatagaaaaataggttagtgaaaaatatatttaagtaagttataggtaaatattaaaatacaattaagacggaacatttttctagagtagaaagtgcatcaactcagtctcattttcttctacataaatgtagtaggcaagatatttctggggagtggaaaaaaggcaaaatcacctctaaattatctctagataacttatatacattgtgatttgcatattataagtacctaattatagattgttacaaatcagaaattaaccatcacttctagatttcttcagttacctgatgctaatacaaaaaatataaacaaattttaatgttaacctcaacaaaagtaaatgtaattagatagttctatttctgttcttatctaaaaatcatcccaaagtgtaaaataggttagaatttttaaaatccacataatatttaaatgttttaaaaatgatgctattatacagaaatttatttcaaaatccagagttgtttactagtgctatatataagttgaataacacatgagtttgtaagtgagctaacaatatactaaagacatttctaaggatagcaataaacaattgttgcagccaggtgcggtggctcacatctgtaatcccagaactttgggaggctgagacgggcagatcacttgaggtcaggagttcgagaccagcctggccaacatagtgaaaccctgtctctactaaaaatagaaaaaaaaaaaattagccaggcacagtggtgcacgcctgaagtcccagctactcgggaggctaaggcaggagaattgcttccttgaacccaggaggcagaggttgcagtgagctgagattatgccactgcactccagcctgggtgacatagcaagatgccatctcaaaaaaaaaaaaagaattgttgcatgaagaaatacagtcattattttaactttactaatagcgcgtaaagccttaattcctttagaccaagtcttttgaaactgaagcaaaatagttatggggaaaaatatccattcagagttcatggtattaagcaaattgtattgatcctttccttacaaaacattccttttcttctgctgctacaaagaggataggaacagaaaatccgagagaggccaggcatggtggctcacacctataatctcagcactttggaaggtcgagatgggaggatcatttgagcccagggattcaagaccagcttgggcaacattgtgagaccctgtctctacaaaaattaaaaaattagctgggcatggtggcatacacctgtggttccagctacttgggaatctgaggtgggaggatcgcttgagcccaggaggtcgaggttgcagtgagctgtgtttaggccactgcactccagcctgggagacagagcaagaccaagacgcctctaaagaaaggagaaggaggaggagggggaaggaggaggaggcggggaggaggaggagaaggagacggagggagaaggagaaggaaaagaagtggggagaaggagaaggacaagaaggagagagagccaagagaataataagccatacttagaaaaactcactcccccagaaaggagcaaataaagagcttggagctgggatagagagatgtcattggcagatgaggaaaacttctatgaggggctttcaggtaaagttactctgaattgacaaagtgtgctggagttatacacagaccctcttaaggttttaactcaaaagtaaaggtctaagttgtctggaaaaaacaagattttgttaagccctgattgcatattgttaaatgaaggttagtgtaattttacattaaatctccttataatacagtgtctctgtgttgatattaacaatactgcataagttttcacagtagttttctatgatattgttgatcttctaactcctatgaggcagtctggtttattccctctactttatagatgagcaaactgattatgaaagatgttgaacacacttaagaacattggtctggagtcacaagagattagactcgtgacattataatgtactagctgtgtaacctaggctaatttctttaccttttcctgccttggtctttcatctttgggatgggaataataacacctatggtcactgtggtcattttgaagattaatgagcttatataggtacatagtttactgtttagatagaagtaagcataaataggagcttctgttcttttcactgttagagatagcaaatttttatgcttagatgtaggaaaacgtaagtgagaacacattcctcagtgtgtcagtgttgtaggtgttcctgtctcaccttctctcattctcctctctcccccttgctctcccctctgcaactcttccaatcacttaacacttgaaatgaataattcaagcccaggtttagtctttgagaccataatcaggttcacttgggtccacctagtgttaatgtgccttaattgcagaccaaacaccaagctggaagtcattgacaagcttcacatatccaaaccttaaaggatgaaaaataaagttatctgctggttggtcttccatatcattccactccatgctatctttatactacactttaggtttggcacaggatttctcttaagagaggaaaaaaattatatgtatgtatataaaaaaattatatgtgtatgtgtgtatatatatgcatacccatatatgtatatgtgtatatatgtatatatgtatatgtgtgtgtatatatatacactatgtatatattatttttaatttcatagccaacaattaggtatcatgattacaaaggagattcacttacttttatcagaattgtaaaaattctatttaatactaaaatcagtctttttcaaagtttaattccatttgaagctaaaagtcagcatccatttttttatgatcttgacacctataagctatattaaagattttacatagaatgttaaggatgtgttaaaggtttagaggaagactatttattttcatatgcacttcttatgttcttaagagaatgcaaatcattttgtacttagagacagatgctctgagaaattttaaaaaattaaaacactgcataaagatgtgacattttccaaagatttttcttcttcctcttgtttctatgtagaactagtaaaatatcatttaaaagtgtatttagaatagtggcaatttagatagtaagatcaatatgaattacaggaatttgttttacaaactttggcatattaaaacgtacagtatttcaagttctggtcttttgtagcatcttttttattcatgcactaaggacaaaggctcatttaaataatcagggtatattgagaagatgtagaaaaatgggtaagaagtgtatgacttttagctcttgcaaattcatttatgctacttgaaatgtaacctgtctttaaaataagagataagatttttagctcaaagtacagaatctgtattatactttatgtgcaaacttgaaatgacttgcatttatggttttttccagagtacttccagaatacacatcacaaaacacttttgccagtcgaaaaaataccaacatctttgaacaaaaagactttttatctttttaaggcattgtggtgatgtagtagtggtgggatgtatgtttgtcttttaagttaatatatctgtgggacttcacaatgcataattgcctactcttatatcttaggacttaagtaaagccaacttatataaaaaatttagacttaaaaaaattatgaaaacttgccgggtgtggtggctcactcctgtaatcctggcagtttgggaggctgaggcaggcagatcacctgaggtcaggagttcaagaccagcctggccaacatagtgaaaccctgtctctaactaaatatacaaaaattagccaggcatggtggcatgcacctgtagtcccagctacttgggaggctgaggcaggagaatcacttgaacccgggaggcagacattgagccaagatcgtgctactgcactccagcctgggcaacagagtgagactctgtcccccctccaaaaaaaaaaaagaaaagaaaaaaaaattatgcaaacaaaactaaaagctgctaactgattagctagaattatttttgaacagcaggaactcagaacatatcctgtcaaataaaaatttcgattccaattaagttcccaattaatgtgcaccctgttgtctcttagatgttgcttctgcctggactgaaaattatgggctacaagaaaagatctccctaaatccctctgttcgctttaaggcagagaaactggaaatggtaaaacctttaaattttcatttttcttccataagacaaaaacaggaaagaagtattctccttctttgagaggataaagtactggagtcattagtttcttgaagttacttatttacaattaaatgaatggcagtttggatttaaattatttaattcacatttgaatttggtagttcatggtggttcactagtacaaaatagaaataaaatctttcataactaaattggcatttggatcaaatagttttctcctcggagaataagacaaatgtgatttttacagtctagaataaatggaaagatgtaacaaattatggcaaagtagacgaggcttcataatggcaataaacacaatcaagtaatagtccattattcaattttttttaagtaaagggaaacaaaattttaaagaacaaaatagtcagatgtccactaaatatagaaagatggtggcagtatactaaagcactgaaaagtagtcctggggaaagtggaacattgagactctcatgtaaaagaaacttaagatgattaaaaaagaaaaattaaaggcagaaaagcactcgaaagcatttatcaggttaccagggatctgaagggaaaaataagccccttttttttttttgatgtaaaatggatatactgctgaaagaccacaaactctaccttccagtcagtttttgaggataaagcattcttacattttaggaagagtataaaaatgcatagctaaaataaagcacacaatctgtttattcccatatccacacctttgcttggtcctatgatagtcctttctcattgccaatttgaatcttatctaaattctaactcacataggggagaaaagttttctcacccatcggtagattcatggctaagacacctataacaaaagacagattaacgagaaaatagcatgcagatttatttaatgtatgttttacctgacatgagaaccttcagaaatgaaaacccaaagaaacagggaaaactgtatttttatgaacagtcatacagaagtgtaattggagcacaaaagggtgtaatctgatggtaataaactggggggagcatagcaaggcctgtttgttcagattcttaacatctctgtgtcttcagagttgaagatatttcctttcctctaggtatagggaggtcctctctggaatgagggtcttttaatctacttttaggggaggatcagctgggttttatggcccacctcaggggagaaaaggtgagagaaggtaagaaagaccttccggcttctgctgttttcttgcacaccaaagtgccatactttgaggcagcatgtcctggattttgtcattcagttccatctccttcattcagactttgctaactattatagttcggaccaacattgccttcttttgcacgttagtagcacttaccttcactttttggtgccctataatcttttctatatcttgttttatcaatgaaattataagtgtcttcaccgcagaccctgtagcacctattagtgtttaaatagctgcttcgtgctccataaaattttccaattaattagatacttgagatgtctcctttatactttcaaaatcctgagtatcttttgtaacgtgtgtttatgtttgtggctaaaatgtaagttctggctaacgcttggtctgcaatcagttaatagtaatattttcaaaaatagagtgtttgaagtttaaaagcatgacaattacatatctaaaaatgaataattattcaatgatattgatttagtatacatttctgaacatccaagatttaataccattcttctggataaggagaaatttatccagctaactgctttacctgacagactttgttattttacttagtttaaatttttctagcacatgatattatttttaatctgattaatattctttgaggtatgaaaatcgaaatttgtattgattctgagaaatatgagttgcttggccattaaatctgaattccagttttggttcccctttaagccttaacaaattatttttgtggaaaagtaaaatgccagttttacatcaaagaaacccacatttgatataaattcagcctctgctcttaatcaagatagacttgttaattttatttagtagagcattcttttttttcagtttgaaactatatttctcttaataacttttttcgtgaaatctacattagcatctatccacccaaattatttcttgagctactcttcttgttttgcattactgatgcaatacaacacaagtaaaagctattacttgttttgcacatactgatattaatgtcataatatcagtatcatctcagcttgaaataggtccttctcttttggttgctactttgtagacagattcaactttgttgtccattacgttttaacacattcctattcagtaataaataaggccaatgtgatcaggtatttaaaataaaataaaataaaatagtatattttttaatcttctataaacattacacgtggcagctcgaaaattggtgttttaataaaatttcacaaggaaaggatgtttactaattatgaatttattaagtaattagcctacccagtacaatttttaaggaaagcagagaggttagaatttgattaaggaaattacctgtcaagacaatgtcatatatatatatatacacacatacaaacatatatatgttcagacatatgtatatatacatgtggcattgtcatgaattcttttatattttattggtttaagtagagaaatttataacactgaactagttatttcttaattccttgtctgtaaaatggatttacatttgcctctttctgtgaatactctgagaatgatttaatatacagatattttaatgttatttcagcatagttatttgtagtgatatatttcttcaaagtatgaatagtatatgtctcatttgatcctaatattaaacttataaatatgcattataaacttagcaaatagggatacaatttattgcttggcttgaaatcaaaatatcgtacctctgcattatctgtatatttatacctatggaagatgctttgggatatggatgccatttcgctgatatttacttttacctcttgccatttctgtaacgtttcaagaaaactgtagagagcaatggcatacccaatgtctcattatagttaatgaaatattctttgtattaggctgaaaggtgtgtgactaatattgtaacaaagtaatttttaaaattcatcattcagacatcagaaaaacttcagcacatttatttgtctaattaacaaacttttatttttgcttcagattaaaagatgaccttagtcatttaataaattattggaaccaactttttgttttacttttttccccatacatattctgcttacatatgagacctactttttgataaaacatgttacttccaacttaaatttaagagcttacctaacatgacatgtggtattcttctagtgtgaattttactttcaacaaaactgtcatttattactaagcttagctctatatcaaagtacactgagttaattgcattgtgtaattttattacttaatgtaagaattaccatatattgagcaccttctgtgatagacactttatttgcattattttttttaattttttttaaatttctttatattaaaatattaatcatgtacaagaatgtatgtattatacacatacagtttaaagaataataaaacacacatttacccatcacccaacttaagaatcagaacctttgacattgctaatgtatttcttcttgatcatatgtacctctccccaaaagaggggaaattttgagttcgtcatttctgtatttttcaaaaattttcagttaatttaagtattgtgggatcaaagagtttattttctttttctttttttttttttttttgcagttgcaagatttaatagagctcccataacaaagggaggggacccaaagagggtagccattggtggctcgaatgcatgagtttatatcccgatcattgtccttcccgctgtactctcaggcaataaattattggctatttctttacctcctgtttttgcctaattagcattttagtgagccctctttactacctgattcgtcgggtgtgagataagttgcaagccctgtgtttaaaagtgaatgtggtcagcttcccagctaggcttagggattcttagtcggcctaggaaatccagctagtcctgtctctcagtcccccctctcaacaggaaaacccaagtgccattgaggaggttggccgacgaccgctctaactgcttcctgctgaactggggtgtagtagggtttgtgcagttgagatttcctcaggaggggtgccttcgatgtcattaacatcagagcatgggctagcaggccggtccaggggtccgcggtagatcttagtcatggactgcatcaggtgctccatttgaagaactatttatggttttacagcttcgattctggaagagacaagcttaacaaggaggttaaagatacagggattgaaatgtatagcctgcagtgcaggggattatttctttggcacacttcacagtgcaccattggttacctttccattggttagctgcaggcaaaagtatttttccttcttcggtggctagccatcctgaggggaggaaactgtgtcctcatgaggttccccattctatttcttcttctgagtactggggctttgtttcccggagggcattaccccatagtagggttccttctataagcatttctaatggagggtcctgccttgcagctctttttgcttcaatatctgcttggcagttcccttctatttcccttttctttcctttctgatgaccccagcagtgtaagacttccacctctttaggtttctgtactgccagtaataatctcctaatggcttcctgatgtgtgataggtgttccctcggaagttaggaattccctttctctgcatattgcctcatgggcatggaggactaggtgagcatactcagagtctgtatatatatttacccttttccttctcctaattctagtgccccaatgagggctattagttctgccagctaagcactagttcctggagtgaggggattactttcaaatattccattatcactgaccactgcataccccgctttttgaggtcctttttctacaaaggaacttccatcagtatacaagttgaggtcaggatcagtcaagggaacctctagaaggtcccctcgagtggcataggtttgagaaattatttgttgacagttatattctatcttcattgtctggaagaaatgtgactgggttaagagttgcacaagtgcacagttgcagcactggcctttcaagtaatagagcctgatatttaagtaaacggttgtctgacagccacaagtctcctttagcagtgagtatgctgttcacctcatgagatgtccacacagtaagatctctccctgtattattttaactgcttcagatactaaaactgctactgccaccactacccataaacaatgaggccaaccctttgccactacatcagtttccttactcaggtatgccatgggttgcaagcttgtcccttggacctgtgtaaggactcccagagctgtttctgtttttttctgtgatgtataaagaaaagtcttgccccgttggcaagcttaacactgggacttgggttaaggccttctttagggcctggaaagccacttttgcttcaggtatccatcttactaaatgggtattggctttctgagtttccttaattactgtatataatggcctggctattttgccatacctgggaatccatattcggcagaagcctgttatgccaaggaactctcttagttgctttagggttttgagatgaggataagccagtataggctggatacattcctcactgagggccttggtgcctttggataattttagtcctaagtatttaacctgctgtgagcagagctgagccttctctttggaaaccttgtagccacaggtggcgaggaaatttaagagtgcttgggtggcttgatggcacaaggtttctgaacaggcagctaaaagtaaatcatccacatactgaaggacaagagtgtccaggtatgataactgactcaagtcttgggctaatgcctggccaaatagatgggggctatccctgaacccttggggtaaaacagtgcaggtgagttgagacattgggttcaaaggatcttcaaaggcaaacaagaattgagagtcaggatgtacagggatgcagaaaaagacatccttaaggtccaggactgtaaaccactctgcttcctctggtatttgggaaagcagagtataagggttaggtacagctgggtatagagggacaacggcctcattgataatcctgagatcttgcactaacctccactgtccactgggtttctgtgctcctaaaattggagtattgcagggctgttgcatggttttactagaccttgggcttttaggtccttaacaatttttttgagtccttgttgggccttggttctaagtgggtactgcctttagggggagggaggcagaatcctttagtttaatttgaacaggatgggcattctttccttgtccatattgtcctcctgttgcccagacttcaggattaattccttcctcaagcacgggacaacaaacgggtgttccttctcctatgttcaggtgtgtaatggcccctgcttttgctagaatgtctctccctaacaagggagtggggctttcaggcataattagaaaagcatgtgaaaagagtaaaattccctagttacaacttagtggctgggagaagtatctagtgactggctgtcctaggacccctcggatagtgacagatctggaggacagttgtccgggacaggagagtaagactgagaaggccacaccagtgtccaggagacagttaacctcctggcccttaatggtcaagcatacccggggctctgtgaaggtgatggcatgggctggcacttccctgggcaccttcagtcctgctgctggatccatctggttagtggcttctgactcagaggaccttcatcccctggggcaattggccttccagtgattcccttgacataaggggtatggacaagggggcagcttatttctacttggacaatcttttttaaagtgtcctcgtaggccacactggaagcaagccctattaggcattcaatttgcccagcttttcccttttccagagtctccaaagtccgcttgcctgagggccatgactaaagtggtggccttttttttttgtcccgtttgtcccgttctgcctgctcctcctgatttctattataaaaaaaccgaagttgccaagttcaatagggtttctaagttttgctctgggcgtaaggcagactttgaagttttttctaatgtctgcagctgactgagtgataaacttatcctttaagattagttggccttcaatagagtcaggtgacagagaggtatgctttctcaatgcctcccttagtctctccagaaaggcggtaggattttcttcctttccctgtgttatagtggacatcagtgaataattcataggcttcttcctagttttccttagtccttctagcacgcaagttagcaaatgtctgtggcaccaatctccatgttctgattctgtgtcccaatgagggtctacactgggaactgcctgctggcctgtggggaattgttctctttcctctgttgtcatcctatcattgacctaactgaaataccagagattgccaaactcttgggctgcagttatggcagcacttctctcatttggggttagtgtctgatttagcagtaacattatatctctccatatcagatcaaaggattgtcctaacccttgtaaagcatcagtatagccatcagggttatatgagaatttacctaggtctattaagtctgagagagaaaaaggtacatgcactctggctggaccaaattctcctcctcccactgcttggagtgggcataatcggggaatattggcactctttggtttgttgtttacccctttgtctatctccttttgtaccgtttgggttgaaagggggtccttattagttggggaaggagtcggggggacgctggggtagggaggtagactctgagggcttcctgtagggcataaatcacactttttacataattgcgagttgtctcttaatgaaaagaaagtttgtacatatggcacttcactcaatttgccttcttttctacaaaagagatctagctgtaagatggtgttataatttatacttccctcaggaggccaggtttctcccccttgaagaggatatcatggccaggcagtactgcagaagaatataagtcatagcgtctgagggtcaaattggtcccagttctccagaatacatcttaagggcatttttgccttggagagaacatttctcttctggaaaaagaacagggatgccagcacccctactcattttccaatgagcattagtcctagagcgtcctttatggtcctaatgcttattcctttccagggtgcgtcaccacccatggacctctgtttatcggtttagttacactcaccgatgtagcagtcctgcacctgttttctcacctttcttgaccacaaagaaaggggtccagagtgctggattctagtcctttaccagtgtgcccaacgttgcctttgtgctcaggggtgagtcctagagctgggctgggttcctgagtatttcataacaacccagctgccccatcaagatgcattcccataaatagttcttatgcaaattcgtttcagagagggtgtaggtaacctttagagtcaggattgagatagtctttttgattctgtaagtactttaaggcttggctgagtgcaaacagctctcacgtttgaggagaccaattattaggcaatttttctaactctgcttccacaagatcctcgctatcaattactgaatacccattgtggctttttcctcaatcacctggaaggaaccttctattgtcctgaagggagttcctcctaggtctggttggtcctttgtatggtaattaagatttaaatcccctgtaaggaaatctgctgggttaagtgaactatcagtggtgttaaattacctttttctaacagaatagccccatactttaagatttttgagttagtaagctacctttttgcttttttgacttagaataattctgaactggtgaggtgtgctcacaatgaggtttcctctaaaagttactttcctacttctgttagcaaagcagttgccactacaggctgaatgcctctgggccgtccgtgggttactgggttaaggatttttgataggaaggctaagggttgtcagtggtctcagtatttttaggctacacccttgtttgcactgacaacaaggtagtattggagtgttatagggtcacggagaagaccttcaattatcaattataggttttaaatttaccctggcttttaaaggaatagggcacactggttttttactatttctatctttctctttctctcttcgactctctttttctcctctgtctctttcgcctctctgcctgtttctctcctctctgcctctgtctctctcctctctgtctcttttctcttagccatttacaaacttggggccctggcaagggtgatggggaacggatcctacataactgcccatgtcgagagctgtatgcctaaattgggagggacaagacaccagggacaagactccctgggtttatagcctagatgcctaaggacgcagcagcgtagagcttccttagatccctttggagatacaacttgctagaggaaatgaaagtctgaatcattagtacctaggaggcagggatcagaggaagtagattcagaggtaagaagaatttgggggctacactttcaagaaagtcgtggtcgggacccaggaggtatgggttagaaggaaaggtaggggtgcacgcatgggcgactgttgaatagagacttctggctgtgccatgatctcaactggctaaagccgggagttcgggacgacagctttcttactctagtcggcccttggcttccccaagaaaattgaaagcggaagctggttctaggcagacgaatgctcccaacccagaagggttgggagttgttagaaagccctttcccagacagcctcacacctgagtcttaagtctggcagccatgctaatcatttttaactggccgacaggtgcccagtattttcctccaattctaaggaaagataggacagaatagcaagcaaaagtggtccaatattactcactgctttggaggtcccttcgtggtcgccaaaatgttactgggggtccttgctcccagggctcccaggatggtggtgggccgcttccaagatggtggcaagcctcgtgttctctgaccttgggttcttggcctcatggattccaaggaatggaatcttgagccatgtggtgagtgttagagctctattagaagccgtgggtcacggaagagaacccacagaacccagtgactagtattgagctcgattaggacgcacccgggcgcttagccgtgcaggaacaatggcaagcctttagcccgatcaggaacggcaatgggcaacttgctggatcaggagcacagcggacactctgccggattgagagggatggaagtcagcagcgggtctgcgatggcagcaaacagcagtggtggacagcgagcgaaaactcagctccagccataacaaacacagaccagaagagtacagttgcaagatttaatagagtgaaaacagagctcccatagaaagggaggggacccaaagagggtagtccgagtttgtttattttcaatttacatgaggtgtgtttcatgcatccgtgtgaagagaccaccaaagaggctttgtttaagcaacaaggctgtttatttcacctgggtgcaaacaggctgagtccaaaaaaggagtcagcaaagggtggtgggattatcattggttcttacaggttttgggataggcggtggagttaagagcaatgttttgggggcagggggtggatctcacaaaatacattctcaaggatggggagaattacaaagaaacttcttaagggtgggggagattataaagaacattgatcagttagggtggggcagaaacaaatcacaatggtggaatgtcatcagttaagctattttcacttttgtggatcttcagttgcttcaggccatctggatgtatacgtgcaggtcactggggatatgatggcttagcttaggctcagagccctgacaaggtgttgctaaaatttttgcttctgtgttttcagctcctacaaaaatacttggctcatagtatatgctgaaaaaaataattgttggattagttaattgttttctgaagtagttttctcaattgtcattcctactagtcttatgtaagagttcttcttgcttcatatactttacatttattctacattataatatagtttgaagtatttctaccatcttattttttatttttgttctcctttttttatcacttattttattccgcctttttattgtattcttttggtttgattatgtttgattatttaattaattgcttttgcattttactttttacctccaacttgtttgaaaattatgtcttctcttgctattcttttagtgatttccttaagattttaacatgcacatttaacttaaaagtctaaggttaatcagaattcctttgtatatacaaagctctacaatacattaattctgatcccctgcttctcaatttgtatacctgtaattgtccaatattttagttttggcgtatctttgtttagtcttacaaattatgaattattaatatatttgtttagctttataaattatgaattattattataatcttgtagccaatgataatttagaattacctgtgtttaccatattctttattcattgttctgttttgcatttctgacgttttgggtggtcattttcccttttctctaagtaacccctttaaatgttcttttggtataggttgatagaaaactctcattttttttatttttctgaaaatattttgccctcatttttgaaagagaattttattgggcatataattctagggtcacagttatcgtctctaagatttttgtagctcttattctcattttttctggtttctgttgttgctgttttgagaactcagctgtcgctctgtctttattttgtaatgatctgtcttttcactatgactgcttttgaaaatattacctgttattggtgttctgtattttcaccttggtgtatccaggtgttgatttctcttatgttagcctatttaggatttttcaggcttcgtaaatctgaagatttatatcttttttaggttctacaaaattctcagctagcatcactttgaatattgcctctctttaattctctttattatctgttacccgttcaattacatatttattagacagactcgctcatcttctatgtctttcaggcctctccttcatattttgcatcttcttatctatctgtgctgcattttcaactctttcttctacacattatttctctgcttcactctcttcaaccatctgctatttcacatattcattgagtttctaatttgttattgtctacctagtattgttataatatatttttcctaacttttattcttgattcacctttttaacttaaatatgttaaacatgttctatgtctaactatacagtagctgcagtctttggctgtcaaatctgtttgtttgtttgtttgtttgtattttacttttgcttatgatgtcatattccctcatatgttgtaaattttttttaattatactttcggccgggcgtgatggctcacacctgtaatctcagcactttgggaggccaaggcaggcggatcacttgaggaaaggagttcgagactaggctggccaacatggtgaagcactgtctctactaaaaatacaaaaattagccaggcatggtggcatgcacctgtaatcccagctacttgggaggctgaggcaggagaatctcttgaacccaggaggcagagttgcagtgagctgagatcatgccattgcactccagcttgggcaacaagagtgaaactccatctcagaaaataaaaattaaatttaaaaataaaattatactttcatgaaaaatggaattttatctttgcgaattttgaagctaatatatgaaacctctggaaaagatttacatatgtatgtttcttagacatcaggaactactggaactaaattcccaagttgtgatttttccggctataaaactattgtacttatcgctatagttatacactctgaggaaaaatattttttcttccacccagacctaaggaagacatattctgtaatgtctgtaggactttcttcttagtttaccattttactgaaagtgttcactatgaggttccagcattgtttgggtgatttaatcctcctccctgcattaggccctaggtgctttcctcttgcttgcaggttttaagccatcaagaattagcagattcttggggtgggcatggtggcttatgcctgtaaattcagcactttgggaggccaaggcaagcagatcgcttgaagccaggagtttgagaccagcctgggcagcaaaatgagatcccatatctcaaaaatttttttaaaaattagccagttgtggtggtggacacctgtagtcccagcttcttgggaggctgagggaggaggatcccttgagcccaggagttccaggctgcagtgagccatgatcatgccactgtactccagcaagagtgagatcctatctctaaaaataatcataatcataatttttttataaaaggaattagcacccattgtctttatgctcacttacctctgcgtattgttgtttcttcataaattttggtatcactccctctcctaagccgacccaagcatttaaggtgtttgtggatgttattgtttattattatctagtagtttttaaaaactttactggcaggattcctccaggatcttttctgtactatcagaaatagttacattttaactttcacataaattataaaatgttactatgttattttttagaaaaaaatgaggatttcttaaaaatttatcaaacgaaaatgactcaagaatagtttcacaatatgtatcaaaatttgaattttgcctatgattttcaggcaataattcctcatttaagaaattttcctaagtaaataattggacaggggcacaaagatgtatgtggaaggctgttcacagtggcattgtttatattagtgaaaaattcatggcaatcaataggagcttgatttaataacacatgatatatttaagagctgtgttcattgacatggaatgccttttttttttttcagttctgtcccttctgtaggagtgcctttttaaaatagttttgttcatcaataaaatcctgaaagctttatataccaaaatattaatagtggttgttgcttgctagtgaacttttagatgttattcacttctttctagattatttgaatttctctaatcatgaaaacataaaatatgcagtatcaaggcatatatactttctgttattttttttttttattctaccctactcctttccttcattctcatggcaatgaaggaggttgtcagaagaggttgtaagtgaatccaattcagccatcttagattaccaaagattacaaagttatttatttttactcaacaaatatttattgtttacttcctctggttgaggcattttagtgttttggcactgtaaaattggtggtatacaagacaaaaagttgtttcctggtatttataattcattgtagtgggggaagtagaaaattcaaaaaacaagtgaataacaagagtacatgtcagacaataagacatggtagattatttcagattgatagtcacggaagagctgtctgagaaggtgaaatttaaactgagacatgaagcgtgagaattatggtgctagggaaaaacttctgagatataagggaacaattaatgcaaaagtactaagacaggatggagcctggactattttaagaaaaaagaaatgtgttcctggcatcatgtgatcaagggaaggagtggtactaacgacgtaagtcagggagataatcagattatttctttataggccaaggtgaggtctctggattttattctgagttcagtaaaaagccattgagccatttttaataggaaagtgaccaatgtgtgtgtatatatgttggtgagtgtacattttttgactcttcattgtggaaaatttcaaatgtatatctggaaaatgatttttgcctagtaacaactaaatggcataacttacagccataaatgtttaacttggagtttatgagccccagaaattctagattaaaatttgcatacatggctatattctgggagcgggtccgtagttcttaatggactttcaaaagtatctatgtaatccttgaacagttaggaacagaacttctaattctggcaacattgtataatccaggaaatccagaagccactcctgccatgaatatagggttgagtctcccttatccaaaatggtgggaaccagaagtgtttgaaacttttgatattttcagattttggaatatttgcatgtatatgtaatgagatatcatgggaatgggacctaagtctaaacaggaaaatttacgcctgagaaacatagcctgaaagtaattttatataatgttttaaaatagttttatctataaaacaaagttcattatacactgcaccatcagaaagcaaaggtgtggactcagccacccgtgtggacaatttgtggtgttgttttggcactcaaaaagttttggatttgggagcattttcgatttcggatttttggattagagatgctaaacctgtatatagaaacaatgaataaaataaagaagtttttaaaatttatagtcaagctaggaaggaagaaaaaaaagaagaatgggtgagaggagaggagggatggaaatctcacaacagaagtgtgtgagcacttgtgtgagtactgacatcatatggctcaaggaatgactcagacttagatattggggctcagttttaacatggcctcaagccgttttcagttggaattctagaactggtatctttacttagagaaacacaagattctgcaagggctggtggcccttttccaaaaaaaaaaaaaaaaaaaaaaaagaaaacactagagaaatgctccaacccaaggaaaatacagataaccccaaagaaagatgattggtacaaatgaatggactatttacaaaagtaaaaaaactgatggcagttaaatatatgaaaagatgccctctgcgaaaatgaaaataaagcagcagtgaggtacaattgcctactcattaagtggacaaacatggagtaattcttcacaaagatatagagaaatagctgggaactctcatgtgatactcacgggattgtaactttagagaacaatttggcaaaactgaacctgctcacatcgtttaacctcacaattctacttctggacatatacactagagaaattctagtgccaccacataaggagatatgtacaatgcagtagtagtcagagcttttcagctatatcaggttctcttccttgtcagccggtgatagaattgtactttcccatgttctttaataaagagccagcgtgcaattcatcatatttctttcctctctgctatagcaggcagcaaaacttctgatggtggaggctttgacagctggggttcctaagtgaaaaatacagagaaagagaaaccagctgactcacattggatatgtaacattagcaaggagaaaatgaacctttgtcatttctaggttactaagactttggggttagagaaacaatggtgtaactagaccatcctgaccaatagatacaagaatatatcagcattatttcaaagaataaatgataggagacagcctaaatgttcatcaataaaagaactgataaatccatggtagcatgattattatcatcattatatgaggaatactatatggtaaggaaaatgaaggaacaagagcctcctgcatcagcccaaatttcacaatgtcatgttttagtaagttatagatggccgggcacggtggctcacacctgtaatcccagcactttgggaggccgaggcaggtggatcacgaggtcaggagatcgaaaccatcctggctaacacagtgaaaccccatctctactaaaaaaaaatacaaaaaattagccgggcatggtggcgggtgcctgtagtcccagctactcaggaggctgaggcaggagaatggcatgaacccaggaggcggagcttgcagtgagccgagatctcaccactgtactccagcctgggtgacagagcgagactccgtctcaaaaaaaaaaatttaatttaatttaaaaaaaagtaagttatagatattactgttgtccttatgaaataaaacaaaattataggagaatactatgaataattatatgccatcaattaggtaaactagattaaatggagaaattcctagaaagatgcaaactaccaagactaactcaagaagacatagaaaaactaaacagactataacaagtaaaaacattgaattagtaatcaaaaaaactttgtacaaatagttccggcccatctatttatttcaggaatgcaaaattggtttaatataagaaaatcaatataataccatgttaataaaataaaggacaaaaccacataatagtctttttttattaaaagcagatacttgattttttaattcttttacgtgatggtctcaatagacacaagaaaaatatctgagaaaacctaacacccttgcatgataaaaaatacccaataaactaacaatagaaaggaatctcctaaacctcaaaaagaacatttatgtaagcctactgctaacatcatgcttaatgggagaaaattggatggttccttcctaacatcaggaataagacaaggatgtctgctttaccacttctattttatgttgcgttggaggttctagccaggataattagacaagaaaaagaaataaaaggcatccagattgcaggaagaattaaaactatctctattcccagatgatgtgatcttgtatataagaaatcctaaggaatccaccacaatattattagacctaaaaatgagttcagcaagtttacagtatacaagatcatatataagaagcaattgtatttctatacactaacaatgcacagtggacaatcttttacaatagcatctaaaagaataaaatatttaggaataaatttaaaaaaagaagtgcaagacatatatacttaaaactacaaaccatcattgaaagaaattgaagaagacctaaataaatggaaagacgtgttgtgctgatgaatctatgagcttaattattaagatagcaatactccccacgtcggtatacagatttaatgcaatctttatcaaaatatcagttggctatttttcagaaatggataaggtgaccctaaaagaaggatccatttgtatggaaatgcaaaagacccaaaatagctgaaacagtcatgaaaaagaaaaaagtttttttttccccccaagatggtagattagagcggtattagcatgcctgtcctccttggaaagacaaaatagtgtatagatattcacactgtgaaccttttcccaagaagcaacataggaacttaacaggaaaatggaataaaaccccgaaaccctttgaaagaagcaggaggctgcagcctacactatgagccagccaaaaaactaagtcccaagagtgtaagatgggtagagatacacaccccaactggggaacctggcagtgtagctcacaggggaaggcattaaccctacccagcactggaactcatatagggggcagtgggaagagcatagcatgcatttgcagtctatggaccgaaggaagctattactgattctatattacaggggactttgtggaagttggccaactaacccaggcagtggttgcaggttgagagaagctcccaactgaaattcacaatataatctcaaatgcagatgaactctcttgtcgagaaccagggggcaaatgggaagtatgctgcggcctcaggcagaggagcttgggcaccctggctttgcaagtagactggaaagggtgtggcctgaaagcctagggttcccatctctatgtgaaagtcttatgacctggggcagttttgattttagctagctgaaatttagctagctgctgctagccaataccgcaagtgagagacctgcattgccaagtgcatgggagctagatgaggcttactgccacctgctactccctactccctgtgtgaactcttctgtgcagcagaggcacctatgcttctacctagaacagtactgcccgtggccagagaaccactctccaaaccccacaggggccactgcttgtccttcaggtggagtcagagcacggacttgcctgacctagctccccctgactttgcccctccacccactctggtagcttaacacaagggacagaaacttgtgggaaccctatggcccttcctatcgcccaagatactagagtacgtcccttgagtatcataaggcaagcacaaaggaagtgaaataatggactttggagactcagaagggggatggtgtgtggggcaagggataaaaaactacatattgagtacagtgaacactactcgggtaaacaggtaaactaaaatctcagacttcaccattaatacaattcatctatgtaatcaaaaactacttgtatcccaaaagctattgaaataaaaaaagaaaaaagttgaactcacactttctgatttgaaatatgtagtaagccttactgtagagtgaaaaaagcaagttttagaaaactatctgtagcatttttatgaagctaaaaaaccagtaaaacaaagtaacatgttaggaatacatatgtatgtgataaaaccattttaaaataaacagatcaagaatgataaagaagaaatcaatagttcagaattcattagtatggttacctctggtgaaataccatatccatattgtgatatgaatccaacagtattcacagttttatgctgcttaagtggattcataggtgttttattgtcctactttaaaactcatgtttttttacatatatgcttttagtatataccaaatattatataataaaaaattcatgggaatagtaaatcaaatatatgataagtcttacctctgggaataagttcaaaaggggtttttatatgttttggttacattcaaaaactgaagtaaatatagttgactgctaagctttaatgaagcaagatagtagatatctattactttattatagtatgtcctataacttctgtattaatattttataattttttaaaaaatccagataattcttacagctgctgaagtcattggcataaagcaaagagcactagcactttgtagcattgtgttccatagtgaaaaattgtgtataatctaaatgattatcagaaggagaatgctttaaaaaaagttcacttcagacagtgtacaaacataacaattttaaaaagcatgcaatatttgtaaaatgtacagaatagaaaggagtaatatattgataattattaacactatagtgtgacaatttttgcaaaaaatccacaatttatataaatttataggtactatattcatagaaaaaaacctgaaaaattagacaccaattgttaatatggcaattgtcttcagagcagtggttctcaagggcagggctgcagtttttcttcttgggacatttggcagtgtctggagacatttttggttgtcacagctggaagatagagaccaaattcaaaatcagtaaagatacttcttaaaacctcatgtatgaaaatttaaaacatattttaaataatttgtgagtcaaaaacattgctaataaacatgtaaatgatgtttaattgcacttgtaattaggggaattcaaattaacaaacagcatactatttcaaatacaacattgacaaaataagagtggaaacagcagatgctgttaaatctcaaaaaggaaaaaaaagaatgtagaaaaatagaaatgcttattcactactggtgtgcataaattaatgaagccagtttggagaacaattcaacaatatctaataaaattgaccatatgtcccctatggcttagcacttccttttctagggatataatgtagagaaattttcacacatttttacaaagagacatgtataatgttctgtaatttaaaaaaaaaagcagattggagtagttataaaagcctgttaatcagggaatggataataaattacaataaattcatacaacggattactgttcacagttaaaataagtgaactagttttgcagacaatattgagcaattatgaaatcataaaattgaggtaaaaataaaaataatttgtagagttactctttaagattatgcttttgaggtaaaagcttaaatgcacaaaataagagtacatattattaggggatacttgcttatgtagtaaatgtcattaaattaagaccaggaagaatacttaggatagtagttcctgctgaggaataatttataaaaacttttaaccgaatatatagttttatttattgaaaatatatacataaattttaagtacatatcaatgagtaattgatgatagtgagtatataggtgttctttgtattattattttttgtgtttatatttgaaacatttttataactgaagagaaaaaaatacagaagctaaaaatcattatgccatgttatacaatgcaaatacttgactactatacgagataagcagatgatgctagactaagcttaagaatcatttttgaaagaatctttcctgatattctttctccattcttctttcattgttcccaaattgctcacttacagattaaccagttgctttgtgtattaatataccctatacatacttctattaaattatgtgttttacttatttctttacagttgttctcacccttgagaccgtaaactctttggggtgagagactatatttcatttatctatcacctatgcatagtttagtggctgacaaatagtaggcaccaaataaattatttgatgaatgaattactaaatgattgaacgagattctaaaggaggaagaaatatgtaagagataattaccaatactaaactttgcctacattttagttttgatgtgatcgacactatatatgctcttgccatatccaataataggacatccaattagtccctttgtgttagttaagattagattttgctatatataactggcgaactcaaaataacagtagtttcctttagaaatttctttcacaccaaaaagaagcctgaaagaaggtaatccagggctgccgtggaggtttcagagtatcagggaccatgttccaattatctttctgttccaccatctttactgcggtaccacatgaaccaaaagaactgctcaaattccatcagttcctctttctttccttccttcctttcatcttttttcttcctctttctttccccttactaatccgcatggacaagaagtgcttaccccgacttttgaaaggagacttcctaatagtactctatggcacttccccttgtatctcattggctagtacctagttagttacatggccgcatggagatgtacaaggggctgggaaatgtcttttagctgcatggcagtgttttcagccgaaaattgtggttggttcggttactaaggagcaaggagagaatggacattggaatacaattaacagtctctgaatttttaatcactaatggataccaaaacgagaaagaacttttcccttaaggggaagagcctgatgaaagagagaagtaagtggcagagaaagctttttagtttactatttgtgtaagcctgcccctaacaagccaaaaattagaagattttatgttgaacctaattcctatcaacttcagttctgctctcaaaggcaagatgttaaccaaatataattcatgttttagagtgtcacttgtaaatctgatgtagtaggattcttttgccattttacatgtgccaaatcatataaactaagaaatagtttgatttttggttctaggacaatgtcataaatttggtattagctaaagtgctagtcttggggaaaaaatgaggtagtagtaaaatcaggaagctaatcttcaataggcacttaatccataaagagctgacttcccttgggtgtttaatcctggtcgactgtttctggtattgattattttccctgggttgtaaagtttgtaatgaaaagttttattctttggagatttgaaaaattgcttttcatgagtcctttatcttccaggctctaaattatcttggtattcagcccacaaaggaacaacaccaagccctgagacagcaagtacaagcagactcaaaagggacagtgtcttttggaggtaatattaggtttattgtgttgtattatcactgaatcatcattcaagagttatggtgacacattttcattaagagtgtttgttctttagaaggagagaatgaaaagtaaaactacatccatttcaaggtccttaatcagtacccaaagaactcagctagaattactgacctggcagggtcagcagaaagaagaatttcattaggacctttcagctctaaaatatcatcattctgtcatattctttttattttttatttattgcataaacattgctttagtaataacaaaagaaacagtacaaaatatggaagttctaatttcactactgtgagattaattcgaatcctttttcagctaatataatatagtaaatatttttatgatgctacctaattagagtcatcccttggtatgggaggggaattgtttcccggacccctgcatatacccaaatccagccatactcaatctcatagacagccttgcagaacccacatatagtaaaagtttaccctccacatatgtggcttttccaacctgcaaatactgtattttttatgcatttggttgaaaaaacttgatgtataagtgaacctgtgtagttcaagcctatgttgttcaggggtcaactctattcttattaaagataccataatgtaccacttagttattgtactataatattaagcctttctactattgtgaattttgatagtttctcagtagctgatattacaaatctgtatttatcaacattatgaatgtagctgtttttctttcttaagccaaatcctcacaaatgatttggacttttgatacatattggtaaattgtttttcagagatattttgcacatatattcgttccaccaccagtaatgtttgaatataacactttttgtcttcttgtcactattaagtaatttttttcttgtataatagatgtaacattgtattatttataaagcatctgtattgctgaaaaaaaattgaccttttggtttttaagtgatgaaaaaaagatatttttcatcccatctccacttgaaaatcatcccaaaataataatgaaaacaagaaacagaaaaacacatacaagtaaaatcacaatatctaaggacagaaaaatgggtgaggaaagtaaatttgtgagcagaggcaggtaaagcccaagtgtgtgaagatagaggaaaatcacaatgaggaacaagttgatttgaccctaaaatgatttaagaattgaagacatcaagtacttctggagactgagtttttaggcaggatattaaaacaggattgttggaaatctttataaggagaattatgcatgctcttctctgctctttctcaagtagtccggcatctcccaccgtacacctccaggagaaaagaagtatattcctttgagaaattaaaccagagatcgtggacctatagttgccagctgcaagggagtttgtggagtatatagtgagtcatcactcgtaatatgcacccagattgctcagggaactttgctgccatgtttattactataggcagaagactatggtattctctctgaagaagctgaacagaaatgtcagctggccaccagattgccctgtagtgaaagctgccagttgacaaagcaagttacacacacaaaatttccaaccaacttttttagtgcccgattcttaaatatgaactcatagtcaagagtcaccagagatttggagaaatcctccaacataaaatatagaacccaaaactatcagacaaacagaaaaaaggaactcagaaaaaaagaaataaagaagcacagaagagaatttcaggtaggaggtcaggtgcagtgactcacacctgtaatcccagcactttaggaggccaaggtgggtgcgtcacctgaggtgaggagttcaagaccagcctggccaatatggtgaaaccccgtctctattaaaaatacaaaaatcagctgggcatggtggtgcacgcctgtaatcccagctactcaggaggctgaggcaagagaatcgcttgaacctgggcagtggaggttgcagtgagccaagatcgtgccactgcactccagcctgggtgacagagtgagactccatctcaaaaaataaataaataaataaaataaaataaataaataaattcaggtaaactctcataacatctttaaagagaaaagtgaaggtaatgcaaccatgaaataaagtaggatattgtaaaacaggaacaatcagagaatatttaaaagaatccttggaaattaaaaatacagtagccaaagtggaaaatatttgaggatacatagatgagtaagttactctccttgtcagaagaagcctatgaactgttctttttcctctttgccacgtggccttggacagttgaaggcatttaacctgtctcagcctcaatttttttcatctgtaaaatggacaggataagaggacctacctcagaagactgttgggaggatgaaattgctaagcactgtgcctgccatacagcagcggttacataaacattatctgctgctattaataattgctatcaaacctcaggttcttccagctagaaaagccataaatcataatattgtcaaatgtttcagaaaaagttctactcataatacaagggttgaaaaactataggtccatgatatatatttgctttattattatcttagctgaattattaattttagcaaagttaactgaagtaagttcagaccaatttgtctcttcttatttgaaattacatttacctatcacttcagtcaatactattttaagataatttatgtgggttaaatttgaaaccttagcaacttcatatagaataaagtaagatttagaaggggttaaatgccatgttcttacttaaatgtgttccattttagattttgtccaggttgccagaaacttgttttgcttgcagttggatgaagtaaatgttggtgcacatgaaatttccaatatattagattcacaggtagagtatgccctatagaattgctttgacatgtataagtcacaagtcttgaatgttatatgtcatatgtgtaggcttttttcacttaaaaatagaaataatacatgtttcttggataaatatataaatacaaatcaatttaaaatcaaaagtaaaagttcatcctgatattcattctcctctctcgctagcctcttgtgctactatcacacctaagtttaccagtattgacaatttgatatgtggaggatacgtgctataactagctagctagacaaactgacagataccatgtgtgcatgtgtccattctaatctgttttatctctctataatatacacatagaaaagcacctatataatgtatatatactatgaaattttatagcctaaaccatccttatttaattagcatccagatcaagaaacataatattaaataaatacattaccagatgctctcctgcccccaggttcctttttgattgctagtaacacccctgtacccccacaaaaaattgggtaactactctttcaccttctaacaatgtagattggttttgcctctttttgtgctttatgtaaaatgggattgtgaagtctattagcttcaatcatgtgttctatagaagtttgacatttatattattgaatattttagtccttttcattgtggatttttggtagttttatcctcttaaggacctccttcttaatttatgttctatataatttgtatatttaattaaaaaattcattcattatgcatggcaaaccacctgtttttgttccaccatcatttatttaaaaacccatcttcatttttgccattgatttgaaatgcaaactttatcatatactaaatttctatctagatacacagatctgtttttctatctaccatttgaatgtttcttaccttaaaatcgacttagtctcatgatatagttataacaacttttcattggttgatttttttttggtttccagtgattaaaataattggatatataaatacatatatttttaaaagaaacctgttattatacaattcttttaaatgttaccagtagaatataaatactacagtattttatacccataaccatctatttcaaagaaaattcatgcattatccttttatgctcaaaattttatcttttctttttctctgttagctcttatttctgttccatatagacctggaatcttatcctgataacacataattgtatgcttgcgaaatgatcaccctatcattttgctgcaaaaaaactttaaatgaattaaaatgatttgttttattttcctatgtttataaggctttacaaattaaaattttcttccatattgaattataattatacttattattggtacataattaataaaattagaaatctgacataacttttgatcaatcatttttatgaacatattaaaaatataaatctgtattttaatgggatgaaagaattcttttcatgccagctctgtcccttatgaaattaccatatttacctgggaatttctggactctttattctggtggcttcttggcttcataagtcttgatatctaataagatgttctcgtatcttatttgtgtttatcttatttacttttaattgacaaataataattttatatatttattgtgtacaatatgacttagaatgtgtatacattgtggaatggctcaattgagctaattaacatatgctttacctcaaataatttatctttttttatagtgagaacacttaaaatctgctctcttagcaattttcaaaatgcaatacatcgttattaactgtagtcgccatgttgtacaatatatctcttgaacttttttctgctgtcttatggaaatgttatgtcctttgacatcacttcaaactgccccccagacctcctgccattcttttaaaatattgctttggctaatcttcagtcttatcttgtccatatgagttccatgaaaaattttgctctgttgaatttatagattatcttgggaagaatcaacgtctttataaatttaagtttctgtgaacatgttatggcttctcatgtatttatatcttctttgatgtcaatatatcttatatatttttaattaattatattttaataatctagtcaccttacgctttttgttgccattaaaattaatggtatcttttaaaaatttgtttcattttaaatttatttggttttacataaaattaatttttatatttaccttatatcttacaaccttgttatacccatttgctttttattttccagaaagtcttcaacattttttgttctaatgacaccctttctgagttgctaatagtcttattaacttatatatttctttatttttgtttctgttttcagatatacttttaaataaatgatatggtcagtcaggttctttgaatgctgctagaaaccctaaattcaagcaggagaatagatatgttacatatttttaataactttttcttttagttcaagtttaaaaacaaaaattgcacttttatttcatggttatatttagagctctactgttttcaagtgatatgctttactgacaggaagtttgaatagtgtttattattaattacatgatttcaaattccagaaacacagagtatataaatatataattaatttattgaacaaataagtctgaccactcatttaaaaaatgatgcatgtcactttttttaatgtttcaaatcactttgttctcttttgtaagcaatctcttttactgctaagcatgttgcccattgcaatcacccacagatctggttgttctgtaaccctcaggagagtgcccagttctcccagaatgaagcactgatttatcagaactaattttgtcgcatttattcaaagagaactaaagctgtattcaaggcgcacagttttcattctgctgattcaggtgttgtgtattaatctacctaatgttgatgtcagggagcattgttttttactgccaaacagttctcagagctgccatgctcatttttgatgaggaaggcaaagatggttgggtagtttacaacaagccaatgaaataggcaattcagagtattttgtatgagcaagcaaatcttttttagcagctgcagatggatggtcatgctccaggttagcaatttatttcctccttaccaatataattttagggcagataagaatgtgtttatagtttggaagttgttgggattaaaaaaaaaatatgttcaacctgtgagactttgacagcaaaagcaaagcgctaatggcaattgtgcaagagtcactaattccagacatgtcaataattctgacatgtcaatgatttccaatttgtggcttcagatcaaaatgtcgtgcaatagaattatattaattttttattatattttttcacttgagtacagaataagaaaacatattttacaccatactcacgtatataactgaaacaaaagcctgtcaaagcattagttaccttttctatgtacattgcattcttatttaatattcacttgtatttcattaaaactttggtttcacgattcgctaatgggtgatgtaacagtctgaagaaacattataaaaatcacaattttagtcatgtggctcaccaaaagcaaataaaaaataactgattgttttgcagtgtaattccctacttttttgagttcaaaagcagtttagtcccccatctgaagtatgccaatcagtctgtagttacagatgctgactgtctgtgagggtggggaattccactatggttaccctgtcaaccgtctcagtttcacaaacaacaggcctgggtcattctgttaggcatgtatgtcttttattcatgttttctttttttggctgataatgatggcttgtctttcttaatttatttttttaaatattattactgaaatctaatatatacagaataaagtacaaaaagtgtacaatttgatgaatttttattatgtgtctcacatggaatcaccactcaaaaggctccctcaggccaccttcccagtcagccgccactcccacctttacattggaaccagtattttgacttataacaacatagattatttttgccccttattgaatttcataataaatagaattatagaatatgtactcttttgtaacttgctgcttttcctcattattttgtctgactcataagatctcttgagatgctatcttttaagtaggaattgctgagtcagtataaagtcagtcctacttttgtttgtttgacaacttttgggtttggaagaatatgacatttagaaccaaaaatataattatcttactgtgagtctaatcatcattgctacattagaaaattcacacagtgctacacctgctgctggcacaaggttatatgcagaaagggcaaggctggagcccacatttagcactactctaaacctagcaatagcagaatatagtccatcatagtatgattttaccagactaatcaagtactgtatcattaatggattatcttaaaattatagagagaacactaaattccctaaaatagatttttcacagtttgggctcttgttaagtcaatttagtgggctgcgactaccattttaaacaagtgaaatagaacaaaatggaaaataccaaagggaactgtatatgataaaactgagtaatgtttcacttatacaggatcatagtatgtatcatatttctcaccacgtatagcagtaaatactttatagccacttccctaacgaaaacacgaaatatatattgaacaactgcagtgtgcatgttttgttatgtgcacatgttattaagataggtaaaacttggcctacatattttaaggaaaagtcatgtgcccaaataattatagtaagaaaagctacatagtgtggcaaggccataagagtaataaagcttagaacattcagaaaagattcataacagttggcatttgagtaaattttgagggataaataggattttatgtgctcaagaggtgagtagggagtgataaaagtattagcataaacaaaaaaattagaacgtaatgcacacagagagtagtctacttaaaaaaaaaaagataattgggttcattcagatgacagagttatgcctcaaagggtaaatgttaagtttagaagtctgtactttactcagtagtcagtgaggagccattaaggaaaacagttaaatgacaaaagtgatattttagaaagaggaatcatatgtgttggttatctaggaagggagtgaaagtggtggtaggtagtctagatagaggactatagaaataatccagataaagatagtaaagaactaaagtatagtgaaggtggggaaaatagaaaggaaagaagttatagatctagattacttaccaaaaacaacaactacaacaagtatgtcatcagtaggacttgctgaccctttggacatgagaactaaggaagaagaatgaataaaaaaaaaaactcaaaagttttgtctaggataactaagaatatgatggtacaggtagcatttatagaaatagggaaataaggagaaagcctttttcaaagtagagaccatgacagattgtgttttagagagatttaagaagctggcaagtacaaataaccaaaggccactggaaattaggaactagacactgggaaggaatttgggaatattttggagagtgatagttgaggcataatagtgaatgtgctcactcaaacttgtagggaaaaaagagaaaagggacaaactttggggaacctcccaaaccccctttctccatttaaggagtagacatgaaagtaactcattgggaatagcctaaatgtgcagaagggtaggtgagatattagaatatcacaatctaaagaagataaaatttcaaggaaaaaaagccttcaacaatgttatatataacaaagaagaaagttggtgggggccattttctttgtcaagtagcagttttattggtgaaattgaaagtaatcattttagaaatatgggagtgagaggaaagatgtataagccagataataagaagtgaaaggaatgagcagggaaatggaaagagaaaagaagatacccagaaatttttaggtgaataggatggtaaagtcacacacaattttataaggaaagaaggtaattgaataggtctctaatggaaggccttatcaataaaattagactgacactgaagttaactgttttgtaactgtttctgtttaaaatgaattgagattagggaatatggccaatggaatagtagttatccagaattgatacaagtcaagtaacttaaaatatgttggagcagcaacagtgaagggagaggtgaagtcagacctaatcagcacagtccaatgacctatagtatgtatttcttgacatctccagaaggagactctagaaagcagagtagaaatgatttacaatgttatttaccagctgttgcaaagttcgggagatccaaggatcacaaatgatattgcgagaaccagacaggaaacagatgtggaaggttaaggaatataaatttcagtagttactgatagattttgaaaacacgcatctgtctggaattgttgctgttaaataacaacaattcatttgccgcttccttagctgaagtatatttgaatggaactatacaaaaaagtcattgagcacaaaggggcttttcaaagaattcacaaggaacatccacagccaattctctggctgcaagtttttgctgcacaatccaaaatagcagtgggattataaaacgtttttttaagtcatggttctgtgactattttgcctctcaaaatagtaccatagattcttttacgcatgctttacctacatggtgttaagttcaaaagtttattgtcacatccctaaaatcccaatcctagtttctcttaataaattattttagctctggtatctaaaattttatttaaactttttttttttttttttttttgagacatggtctcaccctgccatcaggctggagtgcagtggtgcaatctcggctcactgcagccttgacctccccacccatctcagtttcctgaatagctggaactacaggagtaccccgccatgtctggctaattttgtttattttttgtagagacatggtctcattatgttgcccaggctgatctcaacctcctggactcaagcaatcctccagcctcggcctcccaatgtgctggcattacagacctgggtcactgcacctggccttatttaaacttctgaatcctgcttatttcacttcttaggatgagaagatagagtaggccatatgaatgttgagtagcaacattgagtttcccagattgtgttttgtttactttagttccatgagctagttcaaaaatcaataaatgaaggcagcagggtaaggaggttgggggtttgtagtatggtgaaattactgaggaaacatcacaagttattatactttttttttggcagttcaaatgttctttagcatattaaggctgttggaagccatacaggaaataaggttaattttttctaaatcatataccactaccaccatcactaccactcaattttgcttttacacaaagcctgttaatatcctttggaacacactctgggaaatattattacattttaaaatgtgttcaaaattaacaatacagaaatgaattcttatgagtgtttgtgttgagtacttctgagagagcagagtaacagagacataaagaatgtagatcatgtaaattatgggcaatgtccatagatacccaaaagctaatgtgacagaccaaaaagaaccagtgatcttcagggaaataagttctccccaaatatgaagaataattcctacttctgttattctggagtttggaaagcaaatatgagtttattatatccattccaccacgttttttgttgaatctttaataaaaatcagagactatgatttgtgggactcttggaatggccatttgttagctgtgaaaccttaggcaagttattaacatttctgagcttgtttcttcatctgtaaaatggagacaaggtgattgatattgaatatatacagtctttagcaatgcatctgcacatataagtttccaataagtggttgatattattaattgtttttattattttttttctactccacatttgccttacctatctaaagggccctgctttaagcccatgcttacataacaaccactttctccacttagtcctttaaattatattttctttagttgttatagcttccacataggagatggctgtagttaaacttggatttttatgtctgattagactatcattgtttttacattgtaattgacggtcagagacatcatgctagatgtacgagatatggtcatctctgcattttttgttattgttattcacttgtgcataaattattaatattatcttcaatctacaatttctgtgcaggaatctttttaagctgcttgtctgttgcattacatttcatttagttaaaaccagatacataatcgataaatatactttactaggctcatgtaaaccatctgatttataatgtacagcattttgttagccttagataccatgctattagaatgaatgtctttagggaatagtttatgttggtaattcctgaagtctttttgacattataaacacagtcttcgaatttggaattttaaggaaaattatattgttaaaataatgataaaggtgacaacaaaatcaaaattctattataagtgacaacaatgtaaggttaaaatgaatgaaattgctttaatactttaatatcccctttatctaatcaaatgactccaacataagaaactgaattttgttattagaatacagaagcctaagattagtcaaaaatgatttttatgttacctctcataattagcatctaatgcacaacttttctcttatattttaatgttgatagcttcttccttgtgattcttcagaagcagatgaaatggaaaggctcaagtgtgaaagagatgatgccttgaaagaagtaaatacacttaaggtaacctctaatttagtttccttatgttttcttcagaaaaaaaagaaaaagaaaaaaatcctatattggattctgaagcattggggcttaattttatttttaatggaaaaatattaatatcaaatagtaaaaatcagattctttattcagttggcctttagagaattaatttttggtctacatatttatatttcacaatatctgtgcaacatttagtgtgaacaatggtttttgctcatgtcttctgttgaggtttcttcttatcctttttattctctctcattagtggccagggcagaattagatgaagagccaataaagcaagtcgtggcaattttggatcctgtgagttctttgggaaatacattttttttcatgtgcagggctattcttaagggacatcatgttttgctaacgtaatttggaattaatattattttagagaggaaaaaaacacacatatcccaaatatactgtaacatttttcttctctttttttgtttgtttggttttttgattcttgtttttgttttgtgtttttgagacagggtcgcactctgtcgcccaggctggagtgcaatactgcaatcacgtctcactgcagcctcaacctcctgggttcaagtgattctcccacctcaacctcccaagtaactgggacaacatgtccatgccaccatgctcaactaatttttttttaaatttttattttgtagagatggtgtctcactattttgttcagactggtctcaaacacctgggctcaaatgacccacctacctcagcctctcaaagtgctgggattacaggtgtgagccaccatgtctggccttgattctctttatgtggtttcattctgtttttagaagaatattacatttaaattatatcctaatttttatagaaagctatattttccaaatctttaggaaaagcaacataactacttgatttaccactaattcgtcataggcacatatttttaaaattattttattaaataaggtatagtatattgataattatttaatttttattaaatagaaaatatttacaccaaaaggaaagaaaatttgttttgctaccttagtttttataatctcaacctctagaggaagccattgttgcaaatatattatttatcttttcatagatttttctctacacagaaaattatattttttaaaaataggcagggcatgatggctgacacctttaatcgcagtactttgggaggctgaggcaagaggattacttgagctcaggagtttaacatcagcctgggcaacatagcaggaccccatctctactatttaaaacataaaaacaaaaataaataaatatatgtatatgtggggacagggagtatgtgagaaatttctgtactttcccttcaattttgctatgaatccaaaactgcttcaaaaaataataaagccttaaaaaatttttttccagtatgtgtgtattttcacttctatgtaagtcacttcatccacacttttttttttacaacttgccttctttttttttctctctctctctctttataagaattatatctcaggcagcttttcaggttaatatacacagatctaccaaattcttttcaataactgtcctatacattaaatagttatttggccagttccctattgatggacattagactatttccagtttttaaaaataatttcatcttcagcagctttgtagatgtatctttgggcatttgtacagtatatacacagaatgaatgtctgaaaatataattgctttattaaaagatatagacacttaaaattttgcatatgttaccatattccctttgaaaaggttttgccaattcacattccttcctaaagtatatgagcatttcactactataagagtattttatatatttcttttcttacctttgaaaccgctatctttccacattttttagtgcaacaattgttttgatggaaaataaaaatttagttttaaaaatacattgacaatgatttccttatattctcttagaaaacttccccagtgttggttaccttaataagataactttttatgtattcttttatcgctacctaaaccattagacttgtggtttatcagaattttcagaggctctcagatctttttcatttccttatagtttatcattgttaactttagtgatatatttgattttattttaatatcaacagtaattattagaatgttaatttgaaagtgtatatgtcatgttaatttaacatttcaataagacttccctgaggagtcattcaataaatcaggatttacctttaaagttcatgaaatgtaactgaatataccctgatatgacaaaacctaaactcccagataagccggcaaccagctagctcagttggttagaatatggtacaaaaattccagataaaacaaattttacatgttataattacctttacctcaaaacctacctattggctggccagttaaagaagccatataaagtagtgtacaaagcaataaatatttcgttaaaggtaatgtttttgttttcagtttttctacttgtattatacactcataaaaagcagaggttgttaaatgaagttcataaagcatttaggtggtgtctcatcacttttcattatcctgtgacatctctattcttcatgtctaatatgaggtacaaataaaaatgaaaccaagataattttatgtcaatagctaatttttatcttgcaagaataatttttaaaagtgctgtgggctttatttaaggaaggctttctgcagaattcacattgctactgctttgcaaaggtgaatggaaaatagatatattttccatttacagatacaaaaaaactagggcacaaagagtgaaggtgacttcccagaacataaaatcacaggagccagcagtctcttggctcctgtggcatagtcattagattgccatattatattcattttcatataccttcatttcacctcttagacaagaataagctgaaatataccagaaaggatattgccttttttaaacattgtaatattgccatgaatctttaccactcaatttaatgttcgagcaattcctctgttcaggtttgtatttaatggctcttaaattactcttagtatttctgatttgaccaataaaatgtgaatttatttaagatataattaataaaaatggacatcgtagggtatatgcttgacttaatttcaaatccaaagatattttatgtgtatgtataatattaatcttaataactattattttatgttttgtttacattagtcatatatgccttttcatggataatcttccaagaataagctaaaattaaattaggaaattaagaggtgagccagtctcatatgccctcttttgtatggtcgaagacctttaattctaatttgtaataataatgctcttcaatttggtatctctttggcaatgatagcttaaccaaaattgtgttaatatttacacatttgtattcttaactggcttctgttagagcttatattttgagattttgcaaaattaaggtaataaaaagtatatttacatcacaatttactgtaaataactaattacttttaagtgcctcatgtaaagccagaaaaatgactaggagcaatattttcagattgtagcaatttgatatttgggaatataggccttgaaacaagggactaagaagtcacacttgttaatactttcataacaagttgttaatttggtggtttttaaatataggaaaaattattggaatcagataagcaaaggaaacaattgacagaagagctccagaatgtgaaacaagtaagtatatgtattgtgtatatatgtgctcgtgtgtgtgtgtgtgtgtgtgtgtgtgtgtgtgaacatatgaggtataattataaagcagtggttctttacaatatcccagagcttcctgatacatattacataatacaaaatagcacagagcttaaaagcaatcacttttggaggctgtacctatgctaaagtcttgctactattgctcaaaacaatgttaaaacctctttgaaatttctttgaaaaaaacatatccatagaccaaaataaccaatctcattacttctccattgttttttcttttctttcatttccccttttttctttttcttttttattttgttactcatacttcattttactaaagaacaaaaaagtcatcaaggcagagcattttttacatttatttgttaataataaaaagcaaatatttattttcactttgcattattcttcaaagaatttgaggtagctcactataaaacaaatatatgacaatatcataaaatgaaaacccaaatgacaaaatataaataagagaacattgttagagatcaacagtgatcacctgattttgaatctccctcacacagtccccctagaaaacataaaatcaacaaagaaagcagatagaaccatacaggacccatattttgaatatgactatgtgacaaaaaaacaccacagcctttaaagtacatataaatacaacaagaaaaataataattccaacaaaacttctgaagcttgcctttactgaaacctggaatacagagaacagaggaggcaaggcttgaaaaattctgaaataaagagtagagagaaactatgaattagatgaagaacaaacaaaatcacccccagaaagagaaaaggtaaacataaatgccaaaatactggccgtatgtcaagacttggtggttcttagcactagctacaaaaaaagagacttcaaggtatgaatgcaatcaaaaatggcagccttgaagaatcattgtttctgaggaagaaccagatcaatagagaatggatagaattccttggagacttcgcaatgataggaaagaaggaaataagaagggaaaattaaggagcttatagaaatgaaagcagaacacaacttattaatccacccaccctaccctatgaccatcaaaacaagatccatagaagaaactgcacagaagagagtgctcttgaactaagaactttttctgtgaaataaaaaagtatagaacaaaaattctatctccatcattataaaacgactgaaaaagtcagatgatatcaatgaaagctttcctcctgatgaaaactttccaaaacaatttaaccacaaaacttaagaaaaatgtaacgtcacactccatactcaagggaatttcctcaaataagcatttgggctatgaaaaacacatctcaaatgagaaacttaaaaaatagtaataatagatattgatcacccccaaaaaaatcaggaaaaagtgaaatgagagttgataaaacttaggaaagaaggaagagacaaaatcctatcagaaatgaaaactaaattacaagttgctccaggaagaatataatcaagtgaaaaggcaatgaagaaaacaagaaaagcaactaggaaagtgaaaatataatcaagaagtaaaagagtttcttaaagaaatcaatcaaaataactgaacagcctaatacttagaactataatccaagaaaactttctataattaaaacaagacctgaatctaatataggtactggggaaatctgacctggaaagattactgtacaatatattctagtaaaattattagactttagaggaaaataaatgcacactgcctccaagtaaaaagattaagcaacttatgaaggcaatagaattagaccagcattgggtttctcaaaacaacatgcaaagtaaggcaatagtggaacaacattttcaggacatgaaaggaaagaaagaaagtatacaaaaatgttttatatagccaacctgactttaaaatatcaaggccatagaaaacagtttgtgatataccagtactaagggaatatttcacacatgatattcctgaagaccttcagataggatgagttttatccaactaaaaaatgcctaaaataactttggaaaatgttcccaaatggtgagaacttcatatattttattgtacaggtgagactaaaatgagtcagtgcatggatgaaaaaaatagcatgaacattacatgtgttaacaaaagtcaaaagatgcaaattttttaatgggaggataagaaagaaaaaagaggaaaacagaatacatcattttgttatataagcaaagcgtagcagtcaataaatatttaaaactgatatcagataaaaattaggtaaaaatagaggagatagcaagcacttaaaaagtaataatggaaaggtaacctatagaatgaaaatacaaaccttcataaacaccaaaaagaattttttaagtaaaaaggacacacaaagaaatgagtaaatatacacaataatttcaacataagaaaattttatagaactgcaaccaaacataatggttatcttaattaacatgaataagatcaactcacctattttttaaaaagtttttcaaaaaatatagtttgccaaaactgaccggagtaaagatagaaagcctaaaaggccattttctgtagaagagataaagtaagttatcaagaaactattctagataaaaggaccaggcaagatggtttcacagagaaatttaaccaaacctttgacagtctcaaaactatataaattgtttcagggtataaaaaatgaaagaaattttccaaattcttttcatgaagcaagtatagcgttgatgtataaacttaataaaaatggcacaaaaaagaagatacagttagactagaaaagcaattagaggcatatgacttggaaaagaaaaaataaaactgtctttttttgcagatgatatggtagtaatctggaataccctagagagtgataaaagtaactcagtaagttgataagctagcaagatataaaattaagatgcaaaactaaattgcatccatatacacaaataataaccagttagaagttttaatagttaaagagaaaccaaaattatatagaaaaataggcaaaagacctgaacagataattcatcaaaaaagctataaaaatgtccattaaacaaatgaaaagatactcaatctctttctctcataataaaagaaatgccagttaaatctatactaccatagaacttctagcttctaaaatcattaagtcaaaccgtctaaagaatgatgacattcattgggggatgacggaggacatcccccaataaaaaataactccagaacctaaacatttaataataagcaactaccaaaggaactggagaatgaacatcatcagacaaattgctcctcctggaagagaagcagaatattaacatgtacctagaagtaagaagtaaaaattacatgaaatggtattctttttgtttgtttgtttttgttttagacaaagtcttgttccatccaggctgtagtgcagggacacgatctcagctcactgcaacctccacctcccgggtacaagcgattctcctgcctcagcctcccaagtagctgggattacaggtgtgcaccaccatgcccagctaattttagtatttttagtagagatgcagttttgccatgttggccaggctggttttgaactcctgacctcaggtgatctgcctgcctcagcctcccaaagtgctggattacaggtgtgagccactgcaccgggcctgaaatggtattcttagagaggtgtcactcctttctgtatcttttatgaacaaggaaaattgaaaatacacctgcctatttttgtaaaagaaatcaaaggagggataaactacacagcaatgaaattgattacctacaacatgggtagatatgcatgttaagatacaggaaagagtgacacttctctaagaataccttttcatgtaatatttacttttgtgtacatgttaatattctactcattcgaaaaatatattaaaaattaagatggaaagggaaaaataaacctaaaactgcaagtgtactgaagaaaatgaatctaattgtatttcaaatgaataccataattatggtaaggaaaaaaaacaaagatagaaccaattcaagcaactagtgaatgcagtatttgtgttcagtgttttgtcaggatggaattgagttgggaaggaatttcatacaagtcctaaacctttttttgttttgttttgttttgttttattgttttagtggtggggcaaagcagttctgaaacaattttagatgctttataggtctgagcaaatgtgttcattgttgttgagaagcagaatctcaatgaaaaagaaaagataaaatagaatgaatgaagtcaagaaaggaccctgagttgggtgtgatggtatgcatctatagttccagccacttgggaggctgaagtgggaggatggcttgaggccacagtgtgctattatggtgcctgtgactagccactgtattccagcctgggcaacatagtgacaccttgtctcttaaaaggaaaaagaaagaaggaaagaaccctgcgggatgggcttgaattggatgtatcattgtgaatacatcatttcttttatatatatgtgcatatgaacatgtatgtacacatgtgtattatatatatgcgtgtgtatatatacagatgttcctcaacacaatggggctatgtcctgatacacccaatccaagtttaaaatatcaagtagaaaatgtgtttaataccccagtaagcctattataaagtcaaaaaaaacattaagtcaaaccatcataagtcagggactatctgtatatgtatattttccctagctctgtcaacttaaagggctaagaaacagacaccctaataacagtgagcacattactatatctaagtgtccagataccactccccactagaagaaagccaggctactcagagaaatgacaaatttcagaaatgaggaagggtaagtaaaatataagcctggaatatcttaatatgccagaaaataaggacgtgctcaaaatgacaggggcatatcacaggaactagcttgaaggggcttccactggccaaatatggaagaacttgagtaccaaaataatttagtacagtaatgtattgcagactatagaagaaatcgtaattcacggtatcattcgtaaattgattaattaattaatagggagaaaggagtacttttgcctatagtaggatgttgaatactgactggtaattgcagagaagctgctagatttggaaatcagtattttatatctattttaataaagacttgatcaggcacaaatcattcaatgctaaatttagggaaaaattttgatgaagagcagaatatttacatggttttaaagtatctctctacaaactgcttattaattgcaagggggtaaaatagcagttatacagtggagaaatcagaaaacaccttgactaaatgttgctaaatgtgctaaatgttgatatcaccaatgaagaacatttgggcattgtgtgactccaaatatgatgcccaaaaaatgactacaacatcacctgtgtaattttctgggcgagaatgtgtaacctgaatctaaccatgaagagatgtcaggcaagctcaaaatgagagaaagttttgtttaaaaaaaaaaaaaaaaaaagacgtgtatgacgtgtgtgtgtgtgtgtgtgtgtgtgtgtgtgtgtgggttgtattctttagaaatgtcaatgctattttcttaaaaaaaaaaaaggtaataaaagtttacaggttaaaagatgctaaagagacgtgaaaactaaatacagcatctgactccagactggatcctctaccggaatgggaaaaatgctataaaggatattattgggtcagttgacaaaattggaatacagatggtagattaaagcattgaattgatgttaaaattcctaaatttgttaactgtactgtggttatataaaagaatatccttattcttaggaaatatgtggttatataagaaaatatccttattcataggaaatattggagtttttagggataaaggaccatgatatatataacttaccctcagatggttaaaaaagtgcatgtatatttatatatacatgtgtgttatttatacacatatatgtaattgcattgtgtataaatattacatatatgaataaatatgtgagcgagattgagaacatgcaaaatctcagccacaaccacttactatcagtggcttacaagaatatattgtttctcactcatgaacatgttggcaaaaggatgaacctggggaattaggtaaatctgggtaaaggatatgaggatattctttatactattcttgcagctcaactgaatatttgaaattatttccaaagtcaagtttttttaaagtcctctattttcgggccaattttcggaccctcattttattaaatatttttgtactttaattgatatgactttttagtgcttttcattctgtatcttttatacctccatgagtttatatggccagatctttttacattttagcgtttgcatcctgaaaatggacatttacaaatctttcttgttagtttttatatgtaggataaattaggggatttttctcctaactttacatttttcttttctcctaaaggcttggaatatataaactttagaatatcagccatgattgataaaataataattgtattaaaggctgatgtaagatgtgaatctaaggaaaaatagcagtttttttctttttctagcagtacctactttttccacatgaggccctcctgtatttatttctgtgaaaggattagtttctgttattaagaaaggtcatgtctgcatgaataagtaatctaaggctaatttgtattagaatttaataagacaaaaaaatgaatatatgaaaaaatatataaacaaaagagagaatcttatatggttcacagtgaattggccaaacacagtggctcacgcctataatcccagcactttggaaggccaaggtgggtggatcacttgaggccagaagttcaaaaccagcctggccaacatggtgaaaccccatctctactaaaaatacaaaaaaattcgctgggcatggtagcacatgcctgtcatcccagctactcggaaggctgaggcacaagaatcactttaacttgggaggtggaggctgcagtgagctgagactacactgcactccagcctgggtaatagagtgatatttcatctcaaaaacaaaacaaaaacaaaaacacagtgaattggcctaaggataagtgcagtagataatggggtttggagttatacctttggtttataccctgaccctgctccttgctagcttttgacctttgtcaaactacttcacctttatgggtctcagcttcctcatctgcaaaatgggtttgataatgggatccttcacaataacattagaggtattaagataatacacatagatgataatgtgtatagcacataccactcaacaaatattacaaataatagaagaaaaaatattaagaggtggaaatgatttgtattaactatttaataaagaggaggaaaatgtaattttaactgagggcataaggggacttttcatagataaggtggcacgtgagctgacccagacacagaaaggcagagcatttcaggctgagaaaacagcatgaaaatcatggcataaaaggggaaatttgcttgtgtttgtggtcaaaataaaccttttctatgctaactttaagttatttgttaatatatttctgtcttcatgtctgaaaaagtgttaatagtacctaccttacaattttttcataggacttgagaatttaagagcctaaacctgtcaggaatctaattttgaatactagttttgacatgtattcttttatcaacatcactatcaaaggcccaggaacataagggaaacacggaaagatgaagctgttaggaaatgacatttgggtgggtgtgttggggcctacacatataagcagttgaataccagcctaagatcttagaggactgccatttaaaatatttgacaaggagagaaaaatgaacaactgtctccacgtataatctgaccccactctttctttcatactccataaccaacttgttgggcctactttttagaaatcacagaattttgccacttttcaccacttccatcagtggtctaagccgccatcaggtcccacctgtgttgctattatagcttcctaccagatcacgctacttttaccctgcctcactcccatactgtctaatctgaacaaagcagccagaaatattgttttaaaactgcacttagaactctccaggactttccatctcagtcaaagtaaggcagaaatgctgcaagtagaaacctccaagtaactgttaaagcctatgagggcctacatgacctgctgtcctttccccatcctaacactccttttaaagtacctcagctctttccacacttctcccctccacccctttactcattctccagctcatctggtctctttgcaccatctttcctctgacccttactgtgtgtggaggagtttcttttagtataactattactatcttacatcttaaataatttacttatgttttgctctttatctgtgtcccccaactggagggtaagcttcatgaagacagctatcttggatttgttctctgatttatcttacaacaatagctgttattaggtactcaaacatttggtgaatggataaagggataaatggaggatatactttaaggttaaactgacagcaagttgggaagtaaccgaagatcagataaaaggctgttgtaatagtctagaacagcaatgtcccttagaaatataatgaaagccacaatatattgctatattttctaagagctacatttttaaaaaaggaaaaagaaacaggtaacgttaattttaatatattttatttagttggatttatctaaaatattactttagcatgcagtaatatttttaaaattcattatgagatatttttacttttttatactgtatctttgaaatctagtgtttttaaaatttagagcacatctcaatttttacactgaattttcattggaaatactggatctgtgcttagatttaataaaatttacagttgaaaaagtaaattcacatactcaaattgttccaaacttattttaaaagtttctaatgactgaattgaataccaaaaatctttttcttttaatgtttacatccacactaacaaaactattttattttctaagaagaatttgtttttaagcaagatcttttcaaagctacatctgttaagtaccgtcactaattcttgtcagctcagtattattagcataaaattcaagcctgtgagatggaggctgcagtgaattatgatcatgccgctgcactccagcctgggcaacagaggaagaacctgtctcaaaaacaaacaaaaaaactggccaagcccagtggctaatgcctgtaatctcaaaactttgggagatctgccaaggcaggcagatcgcttgagcccagcagttccattccagcctgggcagcatggagaacccccgactctacaaaaaatattagcatcaaattcaaggagtattacaaataacaaaagcaactctaaatttagcagtatgaagaaagcatacttcaaaattttttcagttttcatagccaatttatgtaacactatcaataattaagatctgcatattagcttatagtagaaaaataggtaaagtcattattttttatttatattatgaaaaagttcaatttcactataaactcttatacttatctagcttcataaactttccttttccttgtagtttgtagtttaactcatttacatgcactgatattagtgagaaaatgtaaatcacactgccattttcttttgtctggttactgaataatagatgcaccttccttttgtttaagaaaacctttaattggagttaaaagtacagaaaatcttcgtaaatctctttcataactcagccaagaagtattggcaaataacatagcatcagaaaatgtattgtcctccttttttcttttaacagttttataaactactgatgactcaatttacgtgcgtatactaaacagtgttagcaactgtatctatgatgcttttcataaaatcagcttgagaaaactaagcacaaatattttcaatatgtatcatacagtggaataaaacaataaagcagcctctttcttctttgaaaatgtcaatacattcaaatttggttgttgttgttgtttctaattttactttgagttctgggatacatgtgcagaacgtgcaggtttattacataggtatacatatcccatggtggtttgctgcacctatcaacccgacatctaggttttaagccttgcatgcagtaggtattatctttatgctctccctccccttgctccaccgcccgacaggccccagtgtgtgatgttcccctccctgtgtacatgtgttctcattgttcaactctcacttaagagtgagaatatgcagtatttggttttctgttcctgtgttagtttgctgagaatgatggtttccagcttcatccatgtatctgcaaaggacatgaagtcttttcttttttatggctgcatagaattccatgatgtatatatgccacattttcttcatccagtctatcattgatgggcatttgggttggttccaagtctttgccattgtgaacagtgccacaataaacgtacttgtgcatgtgtctttatagtagaatgatttataatcctttgggtatatacccagtaagaggattgctgggtcaaatggtatttctggttctagatccttgaggaatcgccacactgtcttccacaatggttgaactaatttacactcccaccaacagcgtaaaagcattcctatttctctacatcctctccagcatctgtgtttcctgactttttcatgatcgccattctaactggcatgagatggtatctcattgtggttttgatttgcgtttctctgatgaccagtgatgatgagcttttttcatatgtttcttggccgcataaatgccttcttttgagaagtgtctgttcatatccttcacccactttttgatggggttaatacatttaaattttcgatgcaacatagctggagcaccatttatcatgatgaaaacttgttttttattatctacctgaaacttttttgacagatgtaaaagggttaaaaatatctacactgcaagtttgatttttttaggctgcaaatcaacattttatcataagtttggacaccctttgaggcagtacatgcctgaaggatgaatttggtagtgtctcttgcatgatatggcccactgaaagctattttaatcaattgatcgttgatattcttagaaagttcttatagtcgatgggcatttgttttattacttaattgaatatcctccattttttatgaaatacgtttcccagtatttttatcataactgaaattactatctcaatctaaaaatggttttcttttttgtgcaaaaattctagccattttatagttacaaatgttggacatttacttctggtgactaattttatttatttatttttttaactgctaatacgaaacttcttatcaaattcaccattaatttgcaaaaatggctattaatattgctcactttatatatatttcaaaattttcttctacagtaaacacactttttgcaaattgcaattgcattgttccagtaatattactagctaatttatctccattttattctgcatcagtagtatgtcttcactttacatttaatttaaatttaattttgtccatacttattttatggacaaatttttactaaatacaaaaaataaatatagcctaataaaaataagtattttaatttaattactaatatgatttacctaggtatcattgtaactcaggctgattgcataaaatattcagataagcctactgtgtgtacatattggtgtgtaaaaaaggatttataattaattaattttttgacactggccacatcagttacgtgtttatgtatactactcaactgactcatgtgcctgacacagacattacagttcaacaataatatcttaaatgatgcagtgattacagtgagttagagttctaccaaaacagtaaagtcttgttttgtgaaaaaatagtttacatttcttgagtttttaaacttaaatacaaaataattataattaaattaaaaatttggttcctcagtcaactagctatatttcaggtgctcagtagccacatataagtagtggctactgtgattggacaatgctgatctagaactctacatcctttctactcagagtggtcagcaacaggagaaatatcagcaatcaggaacttagaaatgcagtcttaggtctcatcccagatctatagaatcagaatctacacttaacaagtcttcaggtgatttgtttacaccttaaaatttgagaagctcttgtccagaaaataggcaatggaggatttaactgggtaatcataatagtaatataccaaaaaggtctatgcagaagacaccatgaggataaagtccaccagatttaacagtcataaaatgtgcagtaataaggagaaacaacagtcaagtctttgtagtttagtgactgagaggctgtaatgatgcaatcaacaaaataagataaatgagattgagggtaaagatgtgtggattcagagtagtacttagtatatagtttccagtttaaacaaaaataattaaaaatacatgtatacatctgtgtatacaaacccacatgcatacatactgaaacaccattcatttcattaacaccgtaaaaaaacatagactacccaaaatcaaccctgaaagtgtccaattttaaaatatgttgaccatggatactattcagcttttcttatgtacatagaatgatattattttgttaagaggattttgatgatacagacctattgttaatgaaagagttcctatgctttagtgaaaatacctttccatttttccaaagattgatttcttttttcacaataaatgagtctttaaaaattataaatacagagtatgtataactcttctcttaaaaatttttaaaaactagaaatttaaatggtgtgaaatttggcagtttctttcctttgatatccttttgaagatcttgacaccaagttactacagtactaatgatcatcccatgtaaattccttaagcacatagataacctaattattaaaacaagctgtgaagggctcatttttcactggaaggatcaccttcattgttttattcaatcaaggatagctaccagaatacctactcactgttttgaaaagaattggctgtactgttctctaaaactcaagtatttttatgagtttttgtgtcttacagaataaccgagcttaagtttaaaatcatgagcacaatttcccatgaaattgttgttattttttcttcaagttctaacaacttttcacaggcatgggccactcttagcgacttcctttgatcaacagctttctaaagcctactctcacacttaagttgtttttaaagtttctttcagcatagtattatgacctaaggcagcaatgaattggtgaacagtccaaagccaaaatatttagcttgtctgaaccagtctttgccctaaagaaacatgggatattaagcatttggcaaattctctgggttcagataagcccacttgtagttggcctcacctgtgtaaaggttgagttcagttcttgagaagagcatgaagtcctgaggcagaaatataaggtcaaatcaacacaggattctctgtggacaattgaggttgaacatgaatcaagtaacagctagtgcagctgacatgtgagctatcttagttttcagatgaagcaacaaaggaaaccaagaacaaattaaatgtgtctttaaaaggaacaacaataataagtgattcctaaagtacttttcacattttcacacttttaaagattgtgtttcttgtgtattcatttaaaaagcagcaaagcctctaattttcagaattgatgtgatttctcttatttttctttagtgattaaatttttactagtttttcagtatagcactagtaggtgttttaagatgctatctcatcttcagagggaaaaagaagaaaaatacatatatttgtcagtcttttctgttctaaaagcatgctgtagtaaaatgttcctgtttccatttcagatagtcactgtggcctcagaatgccagcttttattttctaccaaaaaccctctttactcagatccctcatgctattcttttattgccacagccacatcctacctgctcccctaacacctggcaaacactaatctgttctatatctccataatgttgtcatttcaagaatattgtataaatggaatcatacagtatgtcatcttttgggattggttctttttactcagcaataattcccttgggattcgtctagattcttgtgtgtatctgtaggttgttccttcttattgatgagtgcatttaaaactggttaaatctaaataaagttgtgggttgtatccatgtcagtttcctagttgtgatagtctattacagtcatgcaagatgaaactactgggggaggttggataaagagtgcattctcctatacatgcctgtaatcccagcactttaggaggccaaagtgggaggattgcttcagaccaagaggtcaaaatcagcctgggcaaccaatcatgactccatctctacaattatcttaaaaggcttttttttttttaaatatatattttaagttctgggatacatgtgcagaacgtgcaggttcgttacataggtatacacgtgccatggtggtttgctgcacccatcaatccatcatctacattaggtatttctcctaatgctatccctcctctcacccctgaccccctgacaggccccagtgtgtgatgatcccctttctgtgtccatgtgttctcattgttcaactcccacttttgagtaagaacatgcagtgtttggttttctgttcctgtgttagtttgctgagaatgataatttccagcttcatccatgtcccttcaaaggacatgcactcatcctttttttatggctgcatagtattacctggtgtatatttgccgcattttctttatccagtctatcattgatgggcatttgggttgattccaagtctttgctattgtgaatagtgctacaataaacatatgtgtgcatgtgtgtgtgtgtctttatagtagaatgatttataatcctttaggtatataaccagtaatgagattgctgggtcaaatggtatttctggttctagatccttgagaaatctccacactgtcttccacagtggttgaactaatttacactcccaccaacagtgtaaaagtgttcctgtttctccacatcctctccagcatctgttgtttcctgactttttaatgatcgccattctaactggcgtgagatgctatctcattgtggttttgatttgcatttctctaatgaccaatgatgatgagctttgattggtgtacctggaagttggaaaaggcttttttaaaagatttttaaaaatctctttgagaaaagaagttataaagctcttatagtgatagacagcaatctggttgaagaaacttattaaacaaacttagttggattttttttacattaattccttttttgtgattcagaaagtgactcctgtattctccaccattaaactatgaccaagaaacagcagtgagcttggagaaggaacaccagcacatagcttttggacagcccagctggcattcctgtttgcgcagacaccaaccatacctagtgattcattagaggtgaatgtagccttctaagcaagcattggcaaacaaaggtgtctatttcaaaattatcatttccaaatagttgtttgtctttttaattgtagaaaagatcttaccatgttaatgattctaagagaaattttattatcctatttataatatagaactcaatttagaatcacagaattttcaatgttggaagaatctgcaattcttcataggaaccttccagttcatttgattattacctatagtaggttggcctagttagaactgatgctgttaaagttctaggttccatactatgagccacttattttctggctatttagggaccacatgtcatactttggcatcagttgtactataagctctatagtaacttataagggagacctggtaagagaatttaagaaacatttctaaatgcgtgctttatatggagtcattgtgaatgctaaacatacagttctacaaggagctctcaatctagtaagcaaaaataaaaatagagcaaaatcgtcactttctagaaagcatttcataataggtgccctgtggctggtgagttgttagaggcatatctatataggaaagtaggcattactccccataattttctttgctttactaaaaacaaatacacatcactaaaattccattattcagttgctaagagaacatctttaagggtatattttaaacatctacttagaagctgaacattttgcatttcttaatgttagagcaatataaattaatttggctgacaaactagtaaattttacccaaggaggaagtagtgataaggcagttaatactataaaactcttatcttgacagtttactatgtgagaaacactttctgtcccttacttcagtatgggactcatgacattgtgttaaatgatttattcacaagctattttagggttaaaaacaagacttctctagtcatgcctaatcccacataaataaatcactatttgaaaatattgctttgattaaccgtcatccatgttagatatcaaagattgtctgtaaccatggatttgaaattaaactgtgaacttcatcacagttcttcagtattgaaggcagctgatttcctgatgtggttgctagtggtattctgctacccctgccacatgccctttatcttgtctgtgtccccttcccaccactgctttttcctctttcctcctctcatattcttaatcactgtttttcccctttcactactgtaattataagatctctttacactgtagttattaaccctatttctaccaattctggggcatatttccctctgtctacaaattgcctttctaatgtttgtttgagatggagtcttgctctgtcgcccagactggagtgcagtggcacaatctcggctactgcaacctccagctcccgggttcaagcgattctactgcctccgcctcctgagtagctgggattgcaggcacgccacccgccacccgccaccatgcccggctaatttttgtacttttagtagagacagggtttcaccatgttggtcaggctggtctcgaactcgtgaccttgcgatccacccacctccgcctcccaaagtgccgggattacagtctaattttttttgaagtttttaaacataaatgtttttgtgttgtcaaacctttgtctttatgatttttcgttttttataactttatttaagttcattcctagtcatatttcagatatatatttacctagatccctgtaatatctttctttaattcatctaagaaattattttgttagatatatggtatgagatgagggtctacactttacactgtttttccaaatagttgtcgcaaccacttttattttgtgttatcatcattatcatagattaaattcttacataatatagggtctgtatggggctatctggtctttctagttgctttttcaatcaatatttattaggtaaatgactgttttatctaactcctctttggccagtaccaactattgctgctttatgaaagccttaaattcttgggccatgtttcctcttgtttctttatttcttgttgtttcaaaatttgcttaccagttttcactgatttattcatcgacatcaacttaagaatctttttatttagctcttgttatgtctcgctttgaatttagaattcttggtcaaattcctccaaaacaaaatttgatgaaattttgattccaatttaattaaatctctaaaggttaatgtggaaggaatatatttctgttttaaagacagatctcccttaagtcccaaatttcagatgaattctaatgtttaacaccccggaagttgcttttgaattgtaccatttttcaatgaaaagagtttaatctgcaattatgaaaggaagtttccaatactataaattttcccttttgtgtaaccagaattggagaattaggaaagtagctttttttttttctatgtcagtcttcattaaaccagaaaatacatgttcaaggttaaatatatttttcaaagaggattgtaactaatatttatattgtgaacaagtttcatatgataaaatttatcaattagatgtatttttatatctgtccttgattagggacttctgtttataaaggagattgaaaattgtttctttgattttctttgatgcttagaagcagaaatcaattttgcaccttttggagagtaaggcagctgcaggtaaaaaaagttgaaagctcttgggagggttaattagagctaattataatctgattgacctgtttttcttccaaaagcttaaccaatctttctttgcaaaatgagcatggattttactttatcatacaaactaaagaaaatctttgtttcttgaagttctagatatccatcattattacacactttataaatgagtgttgctacctaaactgtggaatcaaggattaggtaaggttgaaaaagaccttcaagattatttagtcttagagaacatgcactgtatttctcatgatggaaaattgtgggttttgttgttttgttttgttttgttttgttttgttttgttttgttttgtttgagacagagtctcgctgtgtcacccaggctagagtgcagtggtgtgatctcaactcagtgcaacctccacctctcaaattcaagagattcttctgcctcagcctcccaagtagccggggttacagggtcctgccaccatacccatctgatttttgtatttttagtagacatgaggtttcaccatattagctatgctgatctcaaattcctgacctcaggtgatccacctgccttggcctttcaaagtgctaggattacagatgtaagccactgtgcctggccaaaaattgtaatttttaaggaaatataaattaatgttcataattttaaaatcttatatttttaatgaaaacaagaaataaaattgacaaacaagtataattgtcatttttagcattggtattttcttcattccacttagtcttatttgcttgataaatactgtaaaaaagattttttaaaatttatataaaaagaatataatgcagcctggcatggtggctcacacctgtaatcccatcactttcggaggccgaggtgggtggatgtctttagatcaccttgaacctgggaggcggaggttgcggtgaatcaagatcatgccactccactccagcctaggcaacacagtgagactctaaaaaagtaatataatgaaataatttgcctattattatatggtgtttctcaaagcatagtttatgattgttattttaattgttaaataaaatgtagttctaatattcccataaatctgaacccttttttgaagaaatttcctatgaaagcttcttgcctaaataagttccttaaggcagtttttgtatatgaaaaatgaaatagtcattttcatggtttgtcaactcagttatatctcattttatgttaagtagagtacctgctcatattagatagggtttttactctcagacagattgtgttctaatttgggcagtcaagaccctttgattttagaaagttgggtaataaagcattttaatgacagttcaagatagcagttaagagtactaaatatgtgattaattacagacgacaaatctaaaagataaaaaaggagagaaagatcatttatacaaaagtagaatggaaaaacagataaggtgaaatctgagatagattttgaaggacaagtaacaactaaatgatggaaaaaggtgaaaaatatatatacctagaggattaatgtgacccaaagtgtcttggaagtagaagaatttcacctggtaaatgtggtaagttaatgtacttggatatgggaatcatgtgagagttaagtggactaaagctagtaagtaggttgatttggaataggtagtagagaactttgaagaatgaagaatgaggatatattttatcatgtaccatgttgttaggtttgttacctaaggtggtacttcatcaatattttgaggaaatcaatctttcagaagtatgcagaatacaataaagaacacagtaggcagggtgatcacatatgtgattttcatagtacccaagcatgagaggataaagacataaatcagtaatacagtggttagaatggaaattaagcaacagctgcaaattacattataaatgaagacttcacagtgcttaattactggttaggtaaggaggaggaggagttggctagatgagtcatggagggggagtgaggaaagagaaaagaaagcatatgtcagaggtctgttaaaaagttctacgaatcatattctcccccatacacattcatgcctgaggggtgagttataccttcatttgtcaatatctgcaaagcattttgggattatccattgaaaggtatattatatatattttaacaaatcagactcataagtcaaggaaactagatataacttgcttttaaacattttaattcaatagctcttttcctgcagtaacccttaatttttttcacaagctgtaatagtaccaagaccaagaagggctttccaaagagtggatgtaggaagctgataagagaagtattctttagggcttggtagcataggttacattgcacaaaaacattatatctctttgcagtctcatttttctcctgtcacctattgacattttgaaagatttactgatgaacttaaaaattgcagaacttttaaatttagtgatgtgaatgtgttagcctaattacagatgtgctactgcaattaatgctttttccttctactatagggagccattcattacaactcataactagaggaaagggctttacatgattgttgctaacattaaaaaatacatgtgcaaattttgtttccaaacaactctccaaagttcaagagctggtgttactaattgagtgcctcaggaaaacccttaataaattattttgtctagctctttgatcacacaggtgattatgtatattttttcaaggtaagaaagaggaaaaggaaaaaattgtgccaagaactattatagtttctttaattctcttgtgagaatagttttgatctaataaaataggtgtgattttccattataaaaatgagcaaactgagtcttagagaattacagagccagaaaatttttaaaagtgtaaaattctgatctgagattctaacctagttatgtcccattcaaagcccatgttttttcattctagatcatgttaccttgtgggggaaaagtactgtatgtggaaaaacacatagtatatttattgtcctgtgtgtgagctgttaccgtgctttgtcccaacaaaagtccaaagtattggtagcctacaaagattttcattagttcagattacattttcaaagaagactttggtctgctctttgaagtttcattatgtaatcgtgaggcagaaaaacctcattttataaagggccagtgtgagttgaagacatttcctcagtgttgccaaaaaaaaaaaaaaaaaaataagctagagattttacttcttaattcaggattcccttctagtatgtttgctcacactgcttagtattaaaaagcataatgcttatgtggattttctgacttactactatatcttcatttttcttttattatctaaccttctaaactgaattaaactctatctagtacatagtaaatcagtaaatggacgacagcattttccctgatgggatttcagtctcatggtgaggcactgggaaaattctggctcagttgttactgacataggaggctgtacagttatttattagaagacagcctgggaggaaaagagaaaatggatttatgtgatcttgtattgctaaatacggcacactgctgttatcttttctttactgcttcctctaaaagtcatcatttcaatgcactaatcttttaaacagccattcagtggtaactgggctagaactttgctaaggggtcacattcaccaacctgacagttacacatttacaaaagaaatagcatgaatttattcagcatcaaaacctctgcatcttttaccacccaactacatttcacactgtattaccatcagtgcacaataatggctatataaattccatccagagtcttcatttaattaactagcattctttgaacaaaaataaaagtgctgtttttatagaggaataaaagctgcatgaagtgagtgtgaagaagacaaatcatcaaattagttattcttcattgcagctatggagaatttcctgccctttctctttagagtctttttttttttagattgattgaatgaaaaatggagagtgaagcagcctcaaatatacctattgtaatgaccacatcataagctcatccaggactgggcactgataatattgtcatctaaaagtgattttttaaaaacattttctgtagttggcaaggtagtacagcatagtagccaagaacatgaactttataactagactgccaaatcttagctctgtcacttactaggtttgtgattctgagttagttacttaactttcctgtgcatcaatgtcctgtctataaaatgcagataataatagacatatccatggcagtgtgtggattaactgagttgatggatgtaaaacattgagaatagtgctggcacatagttagccattatctcctgtatgcacagcagcagtctagtgtgaagttgatctagctgtgtcactagagactctcttgatcatctgaatgaaattgactggtgtggtaggctaggttaatgtacctaccttttccagatatttctttctaaaagtattcttttattataaaacaattacttttagatacaaggaaataaagtcctttgagtcaagggcatagaaggcaattggttggccacatctctccatctggcaccctgctgccagatttagctttctaaagcactgttttctcatatcattttctgctcagaagccttcaagtcttcttcagactcaagctccttccccttcatgcctgccatttctaccagagcctgactccctccctttccacgacctttttttatccattactcccctatagcaagtctctactccaatcataattgatctagtattgtttcacagtgtgccacatttcttcttgtctctcttcctttattcacatggttctctttttgtaacatcctcttttcttcatccatttatctaagtcatacctgatgttctaagttgagacagaaaaggagaggttatcttttacccctttgtatttttgtcataaacatggttgctagatgcagtggctgctaaataaatgctattgatgaactactctgttggctttaccttcaaactgtatttagaatctaactgcttcacaccaactccaccactatcacccttattgaagctacagttaatttttgcccatctcctttttcttctccctgcttccacccttgcccaccatctacagtctattctcaacacagcagcaaaagtaacacttttaaaatttaagtcagatcacatcgattctctgcccaaaaccctccaatcatttcccatcttaccctgagtaaaaccaaagtccttgcaacggcctacaaattctcttagcctctgccacttcactctacctccatccctatattcactcttgttaccattctgccctcatgtcttactactcccgtcttcctggaccctactactcctacctctactacactggcttccttgctgttctctgaaagacacaaatcacagctccatctcagggccttcatgcaaactgttcgctcttcctagaaagctcctccttgggaaatcctaactccattcctcctgcaggtctctggtcagttatcttttcaatgagacatttacctctcatccctgatttactgtctatctccccaaacttagaatgtaaattccaaggagcaagagggaaggctttttgtctatattgtttagtgtctacccccagtacctgaaacagaacctgacacataataaatacttaataaatcattattgaatgtatgaatgaaaaactgacccttaagaatatgccagcattcctaaccctcccagcacttcaaatgtatttaggctcaaacaaaagcaaatgtcccttaacagctctgaaaaaattaaaatagccatagtttaatattagccatggcaattggagcagaaagttctatcgcagagaaaagagatttctgcatcaagtaaagaaaaaggaatggtttacagtataagaagtgccatattaaattatattggtgtcctgggggactgtctttgacccagtaccaaggtacatttttttccctccaagtacattttgatagagcaagtggttttggctaccctttcctcttcctaaggtggaaggtatacctgtatggggtttttttgttttttcatttagaggcagagtaaaacagtagaaagacagcattaatgttgcagtcaggcagacctagtttcagattctggcactgctgtgtgttcttgaacaggtcatataacttctctgagtctgtttgcttatgtatgaaatgttttttagtaatgtctttctctcaatattgttttaaagattaagtgagaaaagacacgtgatgcacctgagacataacatgtgtttaataaatgtcttgtgagccttgcattcaacaacacgattatgtactttgctactaaatgctaccttttggcttaaaccaaaagggagaagtagtagatagattgacgtccatgagataactttagcccctggagcttggtccatggagaagccccataacactactacaaatctctcagcagcatctgatgaccctacaagagcctttttagaacatgagtcctactacctacttgagttttgttgtagcctactctttttatcttttgagccctttcttattcttctgttttccattttcaactatcttctacttcctttattttcaaaatgttatgctaggtatatgaagtcaagagattccatgctgaaatcaacaaaggaaaaagtaagatcaggcaactacctcacataataaaataacataactattaattttcaaattgataaataaataatatatgtatattgactttttggaattataacttccagagcaaggaaaatattttgtataaacctcggaactatttcttatgtattttttaaatgacattaattttgaaatctttaggaagccaaagctgtagttgaagaaacaagagccctgcgtagtcggattcatcttgctgaagctgctcagagacaggcacatggaatggaaatggactatgaagaagtgatccgtctgttagaggccaagattacagagctaaaggctcagcttgctgattattctgaccaaaataaagtaagcaaagcagtcatctcttccagttaccatggtttccttgccgttgtcatgtatcctgttttcattttcttttcatctgcacttctaaactaggtcagtgtttgtcttctattattcaatgataggatgctgtgtcctgatggggataatgtaaaggtcttgagccttcctttatccagatggctttgggatggaaaagcatgtgccccaaatttatttaggtcattggtcaaaattgttcagttcaggtattaagtcctggaactctttaacatttaattgattacattggtttttttcttttgtttctaaacctgctaatttgttttatgggaatgggagcaggggagtctaggaatgggtttgctctttgattagagcattcaaggaagtattaaagtgaaggaatgtttgcctaaggcctagataattaatgggaagaaactgagtttgaattttttttaatgtgaggtgtactaaagtagtttccaatagatgattttccagtttcaatagcaaaatactgaatgcttttcagaaggcagtgcgaactttttgttgttgttgacacagagtttcactcttgtcgcccaggctggagtgcaatggcatgatctcagctcactgcaacctccgcctcccaggttcaagtgattctcctgcctcagcctcccaagtagctgcggttacagacacctgccaccacacccagctaattttttgtatttttgtagagacagggtttcaccatcttggccaggctggtcttgacctcctgacctcaggtgatccaccagtctcggccttccaaagtgctgggattacaggcatgagccaccacgcctggacagtgcaaacttttttatgcaatttttttttacataatacatactatattcagtgaagaggcttcaaaaatctataatagtcatatatttttacttcactgaattaaggtagaaaatcgagtaaattgaaataaatattcatacatttgttcacttacaaacataactggttatgtatatctctaatccaatcagtttctaagagaacataaagaaaatctgaataatttatgactatttaaacattaaaaagttaaatactttaaatatagcatgtgaaaatgaaactagtgttacaaatgcaaaataccaaagaaaatttgaaatctgttaaaagtcactaaactatttctcacattattcacttaaaccaattccacaagaaggctgaagttcccatcaccctttgataataccacaaggcgaagaggaaaacatatagtttacaaatcagcaatatttaggaatattacatatttgttatttgtgacctggtttttacattctgaaagtagatatgtgataatgttatgtaactttagcctgagtatgaaaatattttgagatttatcacaatatcaaaagtactatttattatggttacttttgaagtgaaaaatcaagagtgtttaatattttatttttaaatgatataactttcaagaaagttcacatgaaattattccttgttttttgtttcttttttaagcttgggttatttgtaatctctcttccagctcttaactgagaaacatttttgtcctaagttgcctggtaatataattaattcagtttttctctcttttatcataatcgggttctcatgccatttctcttaacaagactctaagccagtaacctgtctctgaaaacagtctttaaagagtctctttaaagagctattaatatgagcatctcaacattcaacattttctaaacccaatatcagtggaaaaaaagaaggaaaccttttttttttaatcatgagattgcttaaagagacattgaccaagatgttacagaattaaaattcaagtgtctatttgtaagataacagattctttttgtaacagtacatttatttttcattataattttttctttatgttatttatttatttatttaccttttggagtttttattcaccttcaacataagaaataaaacattactagtacctttgaagacccacagtgtttctctccaattgcatctcccaccctttccctcagagataatcactttcttggatttattcttaaccattttcttgaaaactttactacttgtgtatatattccttaacaatatgttgtttagttttacctgtttatcaactttatataaatagaaatatactctatgtatcattctgacctgcttttcttcactcgacattttgtttttgcatttcatctatttgaagtttttagctagttcgtgtcttcttattgtttcttgtactctattgtgtggatatactacgtgtaattatccattctgcatttgatggacagtccaattgtttctgttctcttctgttataaatggtgctaaaaacattttagtgcatgtatcctgctccacatgtgtaatagttacctgctaggagtagaattgctaagttgaataattgtaagtttggctttactaggtaatgcctacttgtgcttgaaagtgtttgaactaatttgtactcccaccagtaatgaataagaattattgtttaccccgcatacttgctgaccctttgttttattttaattttattaatctggtagttgtaataagtgttacatcattacagtttaatttgaatttccctggttactaatggctttgagacagtgatgtgctgggaccaactgacactagctcatgagagctgattgcatgcatctcttctcaactcaatgtacagtgatatcaggttggtagcttgaaatcagctataatggggttatttctacccataaatgttataaaccaaggtttcctcctccctggtagccagttgagcatatatttatctctttattaggcatttgtgtttctctgtgaaatgcttcttcatatcttttgaccctttttcagtggattagttgtctttttcatgtagatgtatagtgattcttctggttactaatcctttgttaaattacatgttataaaaatcttcttccaaatttctggcttgccttttcactctatggtaaaatggacacaaatccagtcatccctcctgacttaatttccatttttgtcagtattttagttctttctttacttttaagaccacaaattagacattgattatttgttttgtgtggtcagcatttgcttaatagactccatttttaccattttctgttaagcattcttacatctcagaccttctcacttggtttctttcttcatgagtacatattttagaaattcatgtagtgaggatctgatgataataagctctccccattttatttgtctgaagaacatctttattcaactcttgttcttgaaatatatttttgctacatttaaaatgttaagttggcatttaatatctttcactgtttttatttcgtgtttgtgatgtcagctgtcaatctgtcatttgtttgcaatctgtttccttctatatgattttaagatatctttggcttcaatgttcagcagtttgactatgatgaatcatgtgtgaacttactttagtgtgtactatttgggattcattgagcttcccgattcgaagagcaatgtcttctgccatttctggaaatcactaagctattatcctgagcgatttctctttcattctttgtatttgttcttgtgtaattcagattggatgtgtgctatagcttcttctggctgttttctctttaccttttctccccatttgtatttcaatttttgtctttctgttccattatgagaagtttctttacctctgttgtcaagttcacccattctctttataattgtatctaactggatgtcaaatctataaataaagtttctaatttagttatgttacatttttatttttgagatgtattttttatgttatctggatctatttcaatagtttcttgtgtattatactttcaattccctcttatttttaaaaacatattaaacataattgccttatattttgtatctgctcacttaaatatctgctgtctttatagatctgatactgtactttatttccttcagttagctttcattcatagagcttattttctcatatgtttagtgatttttgtttgtgtctgtgagatcatgttctatcaatgcattataagtgggaattctttgagctctgagttttagaaatatctctccagagttttgagtttgcttctgctagcctgggaccaatttaaagtaaaatttcagcatatggctttttaggccacacagataatgtaaattctggccccaaacctgtgtgaatggggacttttggttaggaattattcaggagaaacttttttactcaagtcacctgagccaacatcaaaacactgtttacctctgtgaagtttacttcttcccagttcacccattgagtttcttctgttttccatttgtgactgttgaaaccccaaactgtaggccaccagggatcagcatataccctccgaacaaataatgcttcagtgctctcttaccccagtgggctcacttggcatcgctgttgcatgtctccatggaattcctttacttccttgctagctttgtcttacatcgtgtgtgtgtgtgtgtgtgtgtgtgtgtgtgtgtgtgtgtgtgtatccagcatttttagttatgttaaattagtagaggtttctgtcagcatctggtaagacacattgcaaaaacaaaacaaaacaaaaccataaactaatttaaatgtattttactataagaatcaataaactcatatacaacttatctcataaaacttgcagtatctctgtgcaaattaacttttaaatatgcagttagttacatgccccccaaaatcaaaacatatgtacagtaagagaaaaagataatttggtaatattgaatattagttcataaaaactgaaaatagggaccagtaatgtaaaactgaagaaatgtgtaaatgctccttttgatatctctgtgcaggaaagtgttcaggatttaaaaaagagaatcatggtactcgactgccaattacgaaaatcagaaatggctcgaaaaacttttgaggcatccactgaaaagcttcttcattttgtagaggtaagtttttctgttctattacattcatctttaaaaaatatataggcaactggcatatagataaatgttactgtatttggtacctagtgaaacattctctagtctcaaagcagcaatgctggcttatggtcagatttagaactgcatacatgatgaaaagactggctaacattttatagattgtttagagaaataattgagacaaggtgatgggattccaagtatatactattttaatgaatactttaccaaaaatcctgataatgcataaacattatttgataactacttaccttataaagaaatgttttcatagctgttatatttctgagtaaaactgcatgttagttcaattgtttgcacccccgctacataatagaagcatcagtttaatccgtggacagaggaggttataaatattaatgaagaaaagatattttttaaaaactgtcaaactgatatatctccttcaccatcttgtttgttgctaggctattcaagaagtattttctgataattctactcctttatcaaatttaaggtaagaaaatttaagtgctttttgcagaatatgggtagtgattaaattcttcatctggtcattgtgactcaaatactaaaaatctcttaaatagtcctaaggtgctacataactcccattggatgccatcatatggaaatagatgcaaggacatattgttttgtgtcccatctctgttaaagaaattcctggaggtatttagtcaatcattgtaaccttgtaatctaaaattatggtagaaaccacctatcctgtctttatcaaaaattctataaagatgagattaacttaaaattctgtaattgtcttgcgtatgaatcaaagttactggtcacaggttcactactaaaagtgtctcaacccagcaggttagttgttctggcaaacagaattttggaaaacatattcatgcaatcattttctttcgttttcatctttcagtagctataaataaaagaaatatatttggagaatatacctcgattgtctcattattcataatatgttttggatttaaagtttcttactagaagctggaaacatactaatcaaatttatttatttcaaaccacaagtttatggtcattttgatacatgatgaaagacatttacaaaagaaagattcttgtttatgcatttccaaagtaatttttttctgctctcataatagctgccactagtcctagatacatcttctacttctagcaatatacgcttgcagaaacaggaagactcaatgaggttgggtgtgatggtgcatacctgtaatcccagtattttgggaggctgaggcagggggatcacttgagcccaggagtttgagacaaggaacatagtggcacacagtgggaccctatctctacaaaaaaaaaaaaaaaaagaaatagccagatgggatggtgcattcctatattcccagctacttgggaggttgaggcaggaggattgctggagcccaggagctctaggagattgaggctgcaatgagctgtgatcataccactgccctccagcctggataacatagtgatgccctgtctcaaaaagtaaataaatactctaccctttactgtgaaaacagcagcttaataagtgaagatatttttggtgtccacatagcattttttaatttagaagaatatttataattcacttctaaactcaagtaatgttttacttcttatgatgaaggaacctgacataacttcttactctccttgctgcttatgatacaagaaaactctgtgaatttcatgattattactctcagtaaggatcttaaaataatcagtaatcacatttatttctttatgggctaagtgtgtcacccaccctcagctttccaaggtcttagttttaccttgactaataattcaaaagttttgttttaaaaattaaggttaaaatgactatttaaaagccagagcctgcccttgccttaaactgcttcatggaaaaaaagacaactttaaatagctacatcacgcaacatttcatggtgtcttagtaaattaaacactagtaaaaactggtgcagtcatttcaatatagcatatcctctacatggatattggccctggtcattcaacacagaataaaggctatgtatttgaatttgagaactgatgcttttgttaccctttgtgaattaatatcattatgcttaggaagatggagtataaataatgatgattttgtcatcagtttaaatttttttttcaagtaagttttagtgtaattttttgaagaaaacatttaatttttaattagatcagaatgcattcattttaggtgacatttgcattttttgaaagtgatacaaatgctctaggctgtttttgattcgaggcaaaaaatggaataatttaagagataatttcaggagccaaatacatatattgaatttatatttaatattactagaagtaataataaatgtattttaacaaattcatgtttatatgcttaatttgaatttatacagaactaaataaaattatatcatgttagcaaaagagaagcactcacaaaataagcccaacaaatgatttaggagacaggtcatccttctattacttctttatcatacatgaagtcaacctaattttaaaatatttctacttattatgtcgtaaataattgaaaacagaaatattgttttatgtgaattacttcaattttggttatatgaaataatttcctcagaaatataaatatttttgtacaaatctataactgatacaacttcagatttagtaaagatagatgttgtttattgtgtagtaagttcaactttattttattgccttcatagtgaaagaagagctgtgttagcttctcagacttccctcacaccactgggaaggaatggacgtagcatcccagcaacgctggcgcttgaatctaaggaacttgttaaatctgttcgtgccttacttgatatggattgtaagttttctgcattttttcactttttaaaagtaatttatttaacaaaacaaattgaagtcagacagttgaatttcgttatagtggcttgcctacagcaaagttgatacctaatcaataaaaatattaatgtaccaatcataggaggagaatatttcctttatgtaaaggctcagaatgaagctctaattaagatatgcctttacatccacttccacccaaagtttctttgaaatggcagaataaatgtaaaaatcaatccgcagcagcactggaaactggaggagtggaatcagcattgaggaacttgttgttaaataataatatcccacaggtggaataagattaaatgtacagtccaactgagcaaaagaccccaaaacacaaatataacagacaaaactgctgaaacgatgagttaagcagaaccatggaaaaaaccccaggatcacagacagtgaagactgggaacagactctggggcagtcagcagggtaattaattaaatggcttggaatagctgaaccagttccctagtcttcagagctgctggctcaggcatatcctcctatgctggagccaggaaaatacctctctaaaggaactacatgaactgtcactagatacccctagagtcatcattgggctagaaagagaagtaaggcaatgctctaagtaacttccatcatcccaacagacagagaaatccttggggaaaacttaaatgattggacattttcctctttttctttttgtgtctctccagacacttttgtctctttatgaatttcaactccctttttctaactacttcttacgtactctttattttcctgcaatgaaaattataatttacctaactatacctataatttataaaaatcaacaatgtgctaatgtactgtagaggagaaataagagggaggtgatttataataaaattatatatatttcaaaacataaatgctttagtacagctatactaggatatataatgtagtcatcagatgcctgcacctaaacagagaatcaccacaaatgtggcaaccatgaatgtagactgatacaggaacattgtgttgtcattttaaatagcatgagcagattgtcatcagtaatgtccaaatgattgtccaaaatggtgaccaatggtaaagttctgaagagaagaaagtaaaatcttccattaatttatatagtaggtacaagcctgggaaatttaatgtatattaaaactatgcaaaaatatttggagtttatctaaaaatggaattttgttccagattttagtaattacaaacagattttttaccaccataaatatctagtaggacatttaaacattatacaggacacagaacaattctttgttgcacaggaccgttcagtgtatccaataatgataggatgtttagcattcctagtaccctttcactaaatgccaaaaatatccccaaacactgtgacaatagataatgcctcacaaatttccaaaaatgccccctaggtgcaataccattcttagtgggaacctctattgttgatccttatttaaaatatgaaccaacaaccaagaatcacctaataatggtccagggggagaagaactgcataacagggagattctgaagagagagaaaaaaagtctttaattaaataaagataatgtaatattctgaagatagctatattatattcttgaaataaaatgaagttattatccttaaagagaatcaatgacacattgcattcataacacaagaagtagttgcatgcaagaaagcatttttttttttaagacatggtcttgctttattacccaggctggagtgcagtggctcgatctcagctcattgcaacctcctcctccccgatcccccatcactcccacccctaggttcaggtgtctcagcctctcaggtagctgagaccacaggtgtacatcaccatgcctggcatttttttatttttagtagagacagggtctctccatgttgcccaggcctggtcttgaactcctggactgaagcaatccacccacctcagcctcacaaagtgttgggattaaagccatgagccaccacacccggccagaaaagagcttttaaaaagtattttacatctcctttttcactaaatgaagatattactcaaaaaagttgtttgattattaaataatataatttatttgaagcacctacctatcacattcctagcacaaaaaacatactcgggaataagttttgaattgtggttgaactatgtacatagcacttttttaaaaataagctgttccatttaccattgctgcagaacaaatcaacccaaaagttaatggcttaaaccaacaatttagtattgtctctcatggtccttttggttaattgcgctcagctaggcagctcatgttagagcactctcacgtggttgcagtcagatgtctgttggggatgcaatatctgatgactctactgggctggacatctaagatgggagctcatctgtggctatcaactggaacacctacctatatttggcctccctagcatggtgacctcaaggtagttgaatttcttatgtggtggctcaaggctccagcataggtgtttcagtgaacaagacaaaagctgtatcaccttttatgacccagcctcagaagtcacacagcctcgctttcaccatattctattcatcaatgcaaatttgaggggatgggacttagactccacccgtgtatgggaaagtgacaaggtctctttatagaagagcatatagtcagaagttattattgtggccatctttggagaataatatgtgatacattactgggtcaaatggtatttctagttctagatccctgaggaatcgccacactgacttccacaatggttgaactagtttacagtcccaccaacagtgtaaaagtgttcctatttctccacatcctctccagcacctgttgtttcctgactttttaatgattgccattctaactggtgtgagatggtatctcattgtggttttgctttgcatttctctgatggccagtgatggtgagcattttttcatgtgttttttggctgcataaatgtcttctttagagaagtgtctgttcatgtcctttgcccactttttgatggggttgtttgcttttttcttgtaaatttgtttgaattcattgtagattctggatattagccctttgtcagatgagtaggttgcgaaaattttctcccattttgtaggttgcctgttctttctgatggtagtttcttttgctgtgcagaagctctttagtttaattagatcccatttgtcaattttggcttttgttgccattgcttttggtgttttagacatgaagtccttgcccatgcctatgtcctgaatggtaatgcctaggttttcttctagggtttttatggttttaggtctaacgtttaagtctttaatccatcttgaattgatttttgtataaggtgtaaggaagggatccagtttcagctttctacatatggctagccagttttcccagcaccatttattaaatagagaatcctttccccatttcttgtttttgtcaggtttgtcaaagatcagatagttgtagatatgcggcgttatttctgagggctctgttctgttccattgatctatatctctgttttggtaccagtatataaccaaaggactataaatcatgctgctataaagacacatgcacatgtatgtttattgcggcattattcacaatagcaaagacttggaaccaacccaaatgtccaacaatgatagactggattaagaaaatgtggcacatacacaccatggaatactatgcagccataaaaatgatgagttcgtgtcctttgtagggacatggatgaaattggaaatcatcattctcagtaaactatcacaagaacaaaaaaccaaacaccgcatattctcactcataggtgggaattgaacaatgagaacacatggacacaggaaggggaacatcacactctggggactgttgtggggtgggtggaggggggagggatggcagtgggagatatacctaatgctagatgacgagttagtgggtgcagcgcaccagcaaggcacatgtatacatatgtaactaacctgcatattgtgcacatgtaccctaaaacttaaagtataataaaaaaaaagtgatacattagtataagttaaatacaagttaatttagttgggatggctcaataatcattattacaagtacccattaatatatggcatattagtagattagtgtgttagattttggttgtttttctgtctcttccctaatgtcaccctacctgctagttgtctttctgcttgcttctaacattccaccatccctctagtttgccacttttaatcttccctatgctggggaatagatgaaaaaagaatgagaaagagagaaagaaagatgtaaagttccatgttaattaactatcaaaatgatgttttcagtacagttctgggtaatagatggcttggcttggtatggggtaacattcaaagaccctctggggtaagttctgatttcacaactgtgttatggaggattggaaactatgccactcatagtgtctactcagttttcccaataaatatatacttaaaaatttgtataacctaatacatttgtaaaaatcaaattatatatcaaaaactcctaagagctaattatgtgaagaaattctgtgggttttaggaggaatgaaaataatcactcgtaatgtgttatgtgtaagttcagaattttatatatcagacatttttatgttggggtggcaacagtggagggaaacacctgcacagacatagcccagtgaacactgccatcattaattttcattatcttgctaacattaacttcagtatctgtcaaacatgattattcaaagaatatattcgaaattctgcagaacttatttggaagaaaagtaaaaaatttcatcagcacttttttttccccaatgatactcagtaatttccaggctggttataaattaattatgcaatcaggttttttatattttatttaaattttattttcaattgacaagtaataattgtatgtatgcatggggtacatagtgatattttgatacacataatatacaatagtcagataagagtaactagcatatctatcatctcaaacattgatcatttcctttggttgggaacattcaatatcctccttctagctatttcaaactatatagtacattattgttaactatactcatcctgcactagtatagaacactagaacttattccttctatctagctgtaattttttatcctttaacaaatctctccctatccccctgttctccgtgtccttccagtctctagtaccctctgttctactttttacttccgtgagatcaacttttttattcgtatatggagacacgcacacataccacattttccttatccattcgtctgttgttgcacactaaggttgattccatatcttggctattgtgaatagtgctgcaatacacatggcaggatgtctcttcaatatgctgactttcttttctttggataaatgcccagtagtaggattgctgactcatattgtagttctatttttgttttttgaggaacctttatactgatctccatagtggctttactagtttacattcccaccagtggtgtacaagggttcccttttctctgcatcttctccagcatttactttctgtgtttttgataatagtcatcttaactagggtgagatggtaactcattgtggatttgatttgcatttccctgacgattagtgatgttgagcatttttcatctatttgctggccatttgtatgtcttcttttgggaaatgtctgttcagatcatttgctcactttttaaatcagattgattggttttttgctgttggttttctgctagtagtttgagttccttgtgtattctgaatattaattccctgtcagaagagtagtttgcaaatattgtctccaattctataggttgtcttttcactcttgattgttacctttgctgtgcagaaggtctttagtttgatataatctcatttgtttattttgcttttgttgcctgtgcttttgaggtctcattcataaaatcttttcccagaccattgtcttgaagtgtttcccctatttttttctcctagtagttttatattcagatcttacatttaggtctttgcttcattttgagttgatttttgtatagggtcattcatctgcatatggatatccagtttttccagtaccgtttgttgaagagactatcctttcccaatgcttttggcacctttgtcaaaaatcagttggctgtaaatatgtggattaatttctgggttgtctattctgtttcattggtctgtgtgattttaggccggtcccatgctgttttggttactgcagctttgtagtatattttgaagtctggtagtgtgatgtttccagctttgttgtttttgctcaggtttgctttggctcttcagggtctcttgtggttccattaaaattttagaatttttttctgtttccgtgaagaatgtcattggtattttgatgggtattatattgaatgtgtagattgctttgggtagtattgttattttaacagtactattaataattattctgatctgtgagcatgggatatccttccatttgtttatagcctcttcagtttcttccatgagcattttgtagttttcccatgagcattttatagttttccttatagaggtattacctcttgcaagggttatgctttgatgtttaaaactagcaaatctatgttgtccttttatttagaaatataattgctaatgttggcacattttgccagtactttttataaatttgtatgacatagcttttcaagtttaataattcagattaaattcagctgattttctttctctttaagcagcagctttttctgcatggaaaacaaaattactaccatgaggtagataattcagccacaacccctccctcattttctttctttgccttggctatctggttatttcaagttacaatttgaaatttttacttgggtaattgcctctactttcttcttaatataagtgttctctaggatgttatactatgggattttctcagaaagctgaaggataagatttattggctcttacagcttaaaaccaggctctaaggaatatctagaagacaattctgttgcccgggctggagtacaatgatgtgatcctggctcaccacaaactccgcctcccaggttcaagcaattctccttgcctcagcctcctgagtagctgggattacaggtgcctgccaccacacctggctaatttttgtatttttagtagagacaggttttcaccatgttggtcaggctggtctcaaactcctgacctcaggtaatccacctgcctcagcctcccaaagtgctgggattacaggcgtgagccaccgtgccaggcctagaagacaattctaaagctttcctggattgtggactccattgaaatctgatgaaaatcttcttcccagaaatgtgagattatacacattttggatccattttcagagtatttatgaaccccgacctaggactctcccatgtataaggaacatgaatgctttccacatcattgcatacatggccatcccagcctcaccagaatacctctaacagtagagaagtgtgtaaatcatagaggcagcctggaaggaagcagcagtttgaatacatgtaaacaatgctccacagaatctctgatgttccttagagatgctccacagagcaccccaattgttcatccaatttcattggccaaattgcttaatttctaggtctgtttttgcatataaaaagtggatctcataatatcaaagtggcaggattgaaagattaaatgtagtacatatgaaattcccaaaagagcctctggtagggtaagatgttccctgtatggatgttgttgttgttgttgctgctgctgccactgccatgactactgctggtgccacattattgttatttaaagtaattaatttaattttactttctcgctgtggtaggtattaaattattattgtctaaagcttctttcaacttggatacatttgaaaatatggtagatgagagcttttcataatatgtatcatttaatgttattattgatgttgtgttagaatgtaattgtcaccggaaactgtggctaaatgtcttaatcagcatcttatctttcagttgtttattgctaactgtgaggaaacttttgtctgttctgtcattattcacagtgaaaacagtctgaaaacagaataggcatttttaatcagtattggaacccctggagatgcttctattgatctccttatatttacatgttctatatcattataatgcctttgtgtagtttctatttgaaataaaatagttttgaactacatgttcagaactgcaatttctgtttaactgacatatagattgacaaaatgattatgtaacaaaagcataaagaggcagttctatctttagaaatgcataataagaaaaaatctggccaggtaacccatatgaggtctttaataaaaagagaatatattgacttcttgttaaattgacagcataagcacaggcctttaactaccttccttcaggcctcatggaaatgataactagaatacaaaatagggcaaaaatcttcaaaagcactagctgttacaggtgaatcctaaaatctttttaatataggagagataggaccacatggatggaaagcaggaagggccaacctgttactcccactgctaaacaacagtaacgattgtgggaataactgactggcaggaaccctggcaggaggacactcttaatatgttctgatttgaaggagtaatgaataaagtcaaagacaggctgggggtagggggcagacgatctcttttcactcttttttatcttagtgagtcagtggcatttgttgaaatcctcaggttcacacagattatttgtcaagcagaaggacaactggggcttgatcctttagaaagtggagacacactttagatctgacagacactggggcatacaggaagctttaaatgtaagaggagttggcacgacagcttcagcaccaaaagccacatcactctgcgcagccacctcttgttctaagtcacttttcaccccactcagactgctgagtcatccttaaactcacaatgcaaaggtacatttcacccagaggtttgagagggtaattccaacaacaatttggtcaaattttagggcaatcaaagggtctacacattctttaaaaggtcaaaaaccagttctgagtagagagctctctaaattcaagcttttatgaataaaaatgtataacatatataatgtgtatatatacacacacatctcattcaggctattctagctcttataaacaaatgcatacatatacatataaatatatgattgtgaaaaggtccacaaataaagccaggaaatacagctctcaagattcatagtggacttcaggatcaagatagaagagggatctcatgctaaaaccttcccattctgctcttacacatagaaatgacattttaaattgtgtgtgtgtgtgtgtgtctgtgtgtgtgtgtgtgtgtgtgtgtgtgtgtgtgtgtgtttagataaaaaacaagaaaggaatatcaccctgcatcagaaacaatatgaaactatcatgataagtaggattttaagcttcagagatttcacagaattgagatcagcaattggagctaaggtttctacacccaagaggccctaaatgatgcctaagcaaaggaagcaaggagcgggaatccttctgtagagaatatactttattttcttaaattgctcatgtattaggcattttaaaaaatccctccagtttatgagccatctgggcctgccactaattaaagttgaaagtaaacatttcatccactacaggtggggaatataaattggcatgacatccttgggaatccgttttgcagtatatatcaagagctttttaaatatccatttggaaggtttttttgaaagttaaaatgtttttaatggtcatatattctcactcaataatcccacctgttactattttttttgcaaaaaagatgtgtataagtatatacatgtatttttattactgcatttcttatacagattgaacatcccaaatctgaaatcccaaatttgaaatgccccaaaatccaaaacttttgagtgcagatatggccccagaagtggaaaatttcacacctgacctcatgtgatgggtggtagtcaaaacacaggagcataacacagtttattcagcgtccccaagagaaaaaaaactaacaaaacaaaacaaaacaccctcccagcccacttcagctttgatatatttttttctgagcaagcatgatggtgatgccaaacaaccacagattgtccacatgggtgaccagaatagtgacacctttactttctgatggttcaatgatcacaagtttggttcacgcacagaattgtgaccagaatagtgacacctttactttctgatggttcaatgatcacaaatttggttcacgcacagaattgttacaaatattctataaaagctgtgtaaaaggtgcttatgaaacaaatgaattgtatgttgtagtcttgggtcccattcctaaggtacctcattatgtatatgcaagtattccaaaatccaaaatacttctggtccaagcatctcagataagggtactcaacctgtaatatcaaaaatatggatgttaccattattctaacggaagtaactcaggaatggaaagccaaacatcattatcttttcacttataagtgggagctaagatatgaggacgcaaagactaagaatgacacaatggactctggggacttagtaggaaggctgggagggggttaagggataaaagactacacattgggtgcagtgtacactgctcaagtgatggctgcaccaaaacctcagaaatcacacctaaagaacttatccatgtaaccaaacaccacctgttcccccaaaactattgaaataacaataaataaataaatgaaatgaaatacataacattttgaaaatatttctattaacagtaaaaaaagtcctaatttctctcagtaaagaaagattatgattttgtattttattaacaaccatgtaatttagtaggtctcattactctgaaaaatctttggcatattattttaggcaacaaaagaaatggatgttcaacttttacaggttgattcaataactatgttatttttactcaaccaattgaaaaataagactgtcaagcagtgaccatctgattgcatgtatttgtctgtgcaagtctcctgcatcacttcagatgttcctatctgaaatcagcaatatattaccttttaagaagaatgtgagtagtagctgccttttttctgttacatctgaagctaattagaagttacttaagcagattagaaaaggttttatgagaaaaaggggaaaggcagtactgtaacattttaaaggccttgatgggatttatcttttaaattcttcccttctttaggagctaaagcttagacttgatatggcgtcttctcattctacttattctggacctcagacattcatcattcttttcctcatttcccccagagcatatatttattaagaagcatgaatttattaaacaaaaaaacattttttttgttttttgttttttgtttgttttttgttttttgttttttggagacagggtctctctctattgcccaagctggagtgcagtggcgcaatctcggctcactgcaacctctgcctcctgggttcaagcgattctcgtgcctcagcttcccaagtagctgggattacaggtgtactccaccatgcccagctaagttttgtattcttagtagagatgggttttgccacattggcccggctggtcttgaacacacacaagtgatctgcccccctcggcctcccaaagtgctgggataataggcatgagtcaccgcacccagccaaaactgtgtttctttaatgaaagtcagctatactattaatatttagaatggacattatggtattttcctctacacaaagtaattatgctatttcttctcctagaattggggtgatgttccaagcattagataatagcttattatatgattctgtgtcacttgagagaaattttacctgtttttgtaaaacagccctgttctctggtgacttgattattcaaagccagataataaccacaacaaatatttgtggcattttgccattcaaggaaatggcgaactcacatattctcctgtgttgtttcaaactgaaagtaggtcactgttgtaaggttccattaagaaaatatatcaaatttaatcttgggagttttaagttggcaaattattgccagcaacaagagaaataattcttttcctagtacaattttatttccagaaaaaatgagttaaagagaaaaacatatcgcttaagaaaaggtaatgatttacattcattatttccttccttccagaactatttgttgagtgtctacaatgggccagaccctaggataacaacacaaacaaggcccttgctatcaagctgcttaggtaaattgtagtgggcagagatggacaagcaagttcacaaataaatagaaaacgtaattgtagacagtgatgagtgttatgcacataataaaaccagattatgtattaggaaagatgagtaagtggagatgctacattagattaattgacaaataagtcttctttgaagaggtaacattgcatcccagactcagccaggaacaaaaactatgggaaggacctttcaggcccagtacaaatgctgtgagataggaacaaacttgacatacttgagggacaggaaaaaaaaaaaaaaaaaagccagtgtatctaatacgtatgagcaagcaggagaacagcatgcgataagggtggatatgtagcaagaagccagataatacaaggctttgaacaccatactaaggagtttggattttattttaagtgtcgtaggaaggcacaaggagtaacatgatatggtctacattttaaaagatcctttgggtgtttgtttaaaactgggctctaagagtagcaagagtgaagaaagcaggaagactaggtggctattgcagtgattgaggtgggagatggtggtaacttgggctcagtttgaagtaacagctaacaaatatttattttttaaaaaggattagtagtgtgtcagcatgtataactttttggaacgcctgaaattcggtgttaatttttaaactttcctattcatgtgcatattgtttcaatgagtaaaaaaaagtccggtagcacagacagatctgctgtcatcttggatcttagactaccccatgtttttctattgtgccttctctgcactaatcaactattggatatttgcttttttcatcaaacaaattccttaaaaagcgctgaaattctttaataccaccagatacatagcagcaatctactaatctgtattggtacacaggaagcaaacatagacagttcttcagtcataaaaatcaggaagccatgatgttcctagtgtttaacatacaaaaacaaatatctagtgtgaatcaatcccaaagctcccacatattgtgagttttcacagaagatcatttccaagaaactatttcaggtttctgtgatactttaatcacataccgatagcattaagatatgaaggcacagctagacaagcaagacttaattctcactacaggcaggaatatagtagttgtcaaggggattgcaggatgtgtactatctagtacttaatcaagtaaaatctatataccttactactaacatggtgaacagtctatcacattaaatggtttcaagcacaaaggcagaaaaaatgcaaggactgcttctaagattgtagaaggcatgagtggtaaaatatagtcaattatcactttttcaaaagatgaaactctgattcctttcacaattagaactgactataatgatagaatgcctaaagtatagtgtgtgtttcagtcctataactggacaaacaaaatgtaaatgatgccagaaagaaacatcctcccgcaaggcctgaaaatctcctcttccaaactgaatgccttattttgggttagtggaataggtattttccagagttcacatgaggacaaagtattaacagctcatctcagaaaaggcagcagtactaaaatgtgtgcagtaacagtcttcataattatttatcatgataaaatagttcaattcagatccagaagttcagttcctgccttcaacaacagagtattaatattactgttgcaggtaatatttttaaaaataacattgacatagaaggttttaaatttttatcagttttgcagttctaaagttctgttttatattaatatgtcctcacagcaaccctgtgagagagacattattctttttaatttaaactatatggaaagatcaaagctcatagaacttaatgatttacttaagtcacaagtttggaaaggacaatgtcagaatcataattcaggtcttctaattctctgtccagggttcctaataaatcctgtgagtctcatagaaatatagttaagacatgatgtcacaattgaactggtaattatttttttctcttttaaagtatatgaaatagcatggtgtgttataattgatggcaccttagatttggtgaaatatgatgacctctctgagtattcgcttcctgtctctgaagtcagggtacagtcttcatatgattttctcaaggattaagtgacctactatgaaagtgttttgctctgtaactataggtttatgggggttttgtgtgtttgggttttgttttgttttgtgtttttagacaaggttcatgctgttgcccatgctggagtgcagtggtgtgatcacagctcactgcagcctcaatctccctggctcaggtgatcctcccacctcagcctcctaagtagctggaactgcaggcacacaccaccacgcctagctaattttttggtattttttgtagagatgggattttgccatgttgtccaggctggagtttatgttttagagttcactttttattttaattcgaatcattcaataaaatatacctcatcttacctaattttcatgacttacaaatattcaggataaagcaatagattgcattgcctcaagaagctttagtagttttcaatctgctataagatatctccctcattgataacattgattttctcaggagataggattgggagattatctgtttttttattggaaactttcatattgcttttttttttttttaagaataagcatttgttactgctgaactttaaagcttatttttttaagtaaaagaatttttaagcatcatggagatctcacagtaagaaacaaaagctctctttgggactatttgcgtaacaatacataaaaaggtaataataaatgttcctaggtaaagaccttaaaactggggatgcactcctccataaagtgagcttaaacctccagacagagttaatagctctttgctcaaacctgtattattgctcttttcatattgccttgtaattatctatttgtatgtttttcttctcactgaattttgtcctaaactgctttgcatctttagtgacaaacactgtgctgacctcataataaataaataataaatctttgttgaatgaaaaaaaatgaagatgtaaagtcaacaactgaatctttaatattttttttctgaaaatgtgagaccttatccaaccagcattattgataaaaattataaagcaattagttcttgggactacacagtgctatttgtgtttctcatttcttttataataactgcagaatctaatgaaagttaaagtcaaaagtagaatagggaaaatattcagagtgagaaaacttgcttcttagacaagttattttacaaccttaagtaaattattcaacctcacttttgccccatttataaaatggtaaaaatgatgtatttgtctctaagcattataggataaaaataaagtaacatttgtaaaaaattgcctgtagttgaccgggcgcggtggctcatgcctgtaatcccagcactttggggggccaaggcgggcggatcacgaggtcaggagatcgagaccatcctggctaacacggtgaaaccccgtctctactaaaaatataaaaaattagctgggcgtggtggcgggtgcctgtagtatcagctactcaggaggctgaggcaggagaatggcatgaacccgggaggcggagcttgcaatgagctgaggttgtgccactgcactccagcctgggcaacagagcaagactccatctcaaaaaaaaaaaaattgcctgtagtttttactacagataaatgaaataaattagttcacaccctaattctatttttatcaaaaaagtagattcatttttacttgtagagaagcagagtagtgaaaagatcatacgctataaggttccaatgccaactctatggcataatagatttggctttgagaattctataagctggctgagtctcattttttttcatctatgaagatggagatatcaccaatccatagggttgtcctgaggattaaagctaatgtatctgaagtggccagctcattgaaaatattatggctcacatctggtaggtacttaatatcaccattatcatcatcatcattataatcttctttgttcattgtcattgtgtaaaaggattattttgtccttacagccttaaaccattctcttccgcacctccttttttttgagaactggaaaccctggaagataatgaacaatttctactaatgtcgatttatatgatctatcgttacattacttctctgagaacacgtgagaaaccgtgtgctaaaaccctggaaagcaattgcaaagtaacatttcatgctttcaagtggcagtaattttgggtaggaaaccagtcttcaactcaaatttacttaatggatataaagattgaaataataaagaagtttatgtctaactagcagcctcaaaggccctctggaaacatttcatacagtcttatatatggaatgaaggaggccttgctgaacttgtttagaaaatggaaatactaaaattgcataggaatgaggtctaaatacccagtagctctctgcaaacccataaactagatattcacaggcatttcatccatgtgaggcaggagtaagccatatagctctctgaaggaaaagtgttccagacagagggaacagcaagtggaaaggccctgaggcaggagtgtgcctgatgtgtttgagaaaagcaaagaggatagtttggattgagaggtccagttcattctgtcgttaagccctcagtttaattgcctactatcagaaaggccttacctaatcacctgtctaatgttgaccttctctccacctccagtactctatttcactcccctgttttattctcttcacagcactttattttttgtttgtttacttgtttattttctacctcctttagtaaaatgtaagcttcttgagaacagtgatcttgaacgtcttctttaccacaattagctaacacctagaacagtgcctggtacctggcacatattcaagagacactcatattttttattgtgcttaatatctgtttagtaagcacatttaatatttaacagatgaatgttgaatatatatattttaatttcatttacttaggaatgaacttaaaacaatgaggcaccatttttattcaccagagtgccatatattaacaatgattggtcatctatagtgttagtaaatatgtgaggaaaccagcatactcatacactgttaatagttgtttactcgattcagcttttttggagcgcagtctaactgtgtctctaggaatctaaatgtacattttttgacgcttcagtttcacttccgaagtctatacagaaatacccatttatatgcataaatataaagattataatgatgtattggttaatgacaaggatatattctgagaatacatcattaggcaatgtcatcattgtgcaaatatcatattgtattcaaacaaacctaggtggtatagcctactatctacttaggctatatggcatatagcctattgatcctaggcttcaagtatgtatagcagaaactgtactgaatactgtatgcaattataacataatgctaagtatttgtgtatctaaacatgggaaaggtacagcaaaaatacagtattattatcctatgggatcactgctacaaatgtggtctgtcattgactgaaacatggttatacagtgcatgactctacctacttgcatgtacaaatagatctcaaatagtctattctttccacaaatatttgttgaatacaatttatcaggcactaagaacataggccagctttgctaatgtcctttagtacaaagcaagcagctgaagctcggtattgaagtaggtaaaacttggaggaagaacagaatcaactcttgtgtatatagatcctaagtaggtaccacgtaccatctgctgagactttctgattaaaatatttctgtcgaagattatacctttttttcagagcaacacaccttatagaaggggaataagactacagacaaagtttcctgtacagaaagtcatgactatgagtgaggatgatacaccataatgagcatgagagatgaaaaaagggagaaactaaagtaaaaccattagagtgaacctcaaccagcccaggcataaaaggagcatgaatgatgccttctgaaagtggatcattagtgcctgccaacctgttgcaatactgaagcactgcaactattttattatctgctggaattgtatttctaccaaaagatactaaagagggtgtgattgtttaattatgtacatatctggatatatattacagactccatgggcacagttttgttttgtcttgttttgttttaaacttggctaaaatgaatttattatcatgtttagagactgtggatgggaacgtagcttgtagggtaagaaatcctaaaaggttaacactaccgtgtacaattacttatagcctcaataaggaaaaagcgtgaaagtactcaagtaaatcaagggaagcttcacagaattctttgatgaacttacatgtttaaacaaatatacaaaagatggacaaagaaacaacctagaactaacaaaaacttttacacatagtgttagggaagttaaggccaggattaacttaaactttgaaaaataaaggtgagaagaactacatttaaagcagtaatgacaaagtagaagacttggtttttaaaggtaatataaaggggaagagtctaagtgttgtgttggacagactctttgggtggtttccatgattcctgtttcctgatgttcatgcctttgtgtgatcctctcccttggagtatgtttgagacctgtgatttgcttgtaactatacaatacagcaaagtcacaggttgtacatgactatattgcatgagattttagtgccaattttgctggaatcttgcactctttactggcttcaaagacatgagctgctatgttaggagactcatgacaaggagctgaggacagtctccggatgaatccttcagtgctccccagtcaagcctcagatgagaccacagccatgctcaacctgtagattgaagccttatgagatcctaagcagaggactcagctaagccatgtccagactcctgtcctacagaaaccatgagataatatacatgtattgtttatgctgctatatgtgtggtagtttgttacaccacaatataaattaacaccataaactattgccatttgcctctgtcttcccagtgggaaaatgaccttcacagtggcaaggctagaatttttcctggaataaaaaatattcttctgttggaataagggatacaaattacattcttagggcttttaggcactcttcagactccttatgagagataaacaccctccctacccctttgacacttttctatctaatcaaaagaaatttgggggaattagaagggtgattttttaccatcttaattaagacaccagcctccagaaccaaacagcagctgttgtattagaaataccactatgaatcttcctgagagaaatagctctccctccttaccatctgatgttgtctcattcagcttaacacttctagtacctatcatggtgcttgacacatagttgatactcaatgattaatgaatgaattcctcattaagttatctcatccatgcattcaataagaaagagggaaattcaccctttgctgtagcacatttccttcttagacttttgggaatgaaaaagcatacatgatatttatttatgtacaaggaagcatgaatgaaccatgagaatacagacatgagtgaactgcttttgtaaataaaaggagctttaaaaacctaatgtgaattctgattacttcatagttctctttattttttctcgatctacagagttgtatatagttttgtttgagacatgttcagagttagtaaatgccaaaagcttgtctgattccaaatgatactgacataatggactcatttgttatgtctgtgttctctatctttgcatcacataaaagtacaaatgtttttataacgacaataattgaaaatgaaatgcctttatctttttcttcatttatttttagcttccttctttgtacacccatgatgaaaacagttttagcattatttattcctgttgaatgcctggtacattgtatctcgttactagcaatttgtgaactctcatttttttttttttatactttaagctctgggatacatgtacagaatttgcagtgttgttacatgggtatacacatgccatggtggtttgctgcagccatcaacccgttatctacattaggtatttctcctaatgctatccctcccccagccctccaccccaagacaggccctagtgtgtgatgtttccctccctgtgtccatgtgttctcgttgtttaactcccacttataagtgagaacatgcagtgtttggttttctgttcctgtgttagtttgctgagaatgatggtttccagcttcatccatgtctcagcaaagggcatgaactcatctttttttatggctgcatagtattccatggtgtatatgtgcgatattttctttatccagtctatcattgatgggcatttcgattggttccaagtctttgctattgtgaacagtgctgcagtaaacatatgtgtatatgtgtctttatagtagaatgatttataatcctttgggtatatacgcagtaatgggattgctgggtcaaatgatatttctggttctagatccttcaggaataggcacactgtcttccacaatagttgacccaatttacactcccaccaacagtgtaaaagtgttcctatttcttcatatcctctccagcatctgttgtttcctgactttttaatgattgccattctaactggcgtgagatggtatctcattgtggttttgatttgcatttctctaatgaccagtggtgatgagctttttttcatatgttttttgaccgcataaatgtcttcctttgagaagtgcctgttcatatcctttgcccactttttgatggggttgtttgtttttttcttgtaaatttgtttaagttctttgtagattctgggtattaaatgcccttcatcagatggatagattggaaaaatgttctcccattctgcaggttgtctgttcactctgatgatagtttcttttgctgtgcagaagctctttagtttaattagattccatttgtcaattttggcttttgttgccattgtttttggtgttttagtcatgaagtctttgcccattcccttgtcctgaatggtattgtctaggttttcttctaggatttttatgattttatgtcttatatttaagtctttaatccatcttgaattaatttttgtataaggtgtaaggaagggatccagtttcagttttctacatatggctagccagttttcccaacaccgtttattaaatagggaatcctttctccattgcttgtttttgtcaggtttgtcaaaaatcagatggttgtagtgtatagcattatttttgagacctctgttctgttccattggtctatatatctcttttggtaccagtattatgctgttttggttactgtggccttgtagtatagtttgaagtcaggtagcatgatgcctccagttttgttttttttttgcttaggattgtcttggctgtatgggctcttttttggttccatatgaaatttaaagtagtttttttctaattctgtgaagaaagtcaatggtagcttgatggggatagcattgaatctataagttactttgtgcagtatggccattttcacagtattgattctcctatccatgagcatggaatgtttttccatttgtttgtgtcctctaatttccttgagcagtttgtagttttccttgaacaggcccttcacctccattgtaagttgtagtcttaggtattttattctctttgtagcaattgtgaatgggacttcacttacgttgcagctctctgtttgtctattattggtgtataggaatgcttgtgatttttgcacattgattttgtatcctgagactgctgaagttgcttatcagcttgaggagattttttggctgagacagtggggttttctaaatatacaatcatgtcatttgcaaacagagacaatttgacttcctctattcctattcgaataccctttatttctttctcttgcctgattttcctagccagaatttccaatattatgttgaatggggtggtgagagacggcatccttgtcttgtgccagttttcaaaggaaatgcttccagcttttgcccattcagtatgatattggctgtgggtctgtcataaatagcttttatgattttgagatatgatccatcaatacctagtttattgggagtttttagcatgaatgggtgttgaattttatggaaggccttttctctatctatggagataatcatgtggtttttgtcattgattctgtttatgtgatggattacatttattgatttgtgtatgttgaaccagccttgcatcccagggatgaagctgactttatcgtggtggataagctttttgatgtgctgctggatccggtttgctaatattttattgaggatttttgcattgtcgttcatcagggatattggccttaaatttttttgttgttgttgtgtctttgccaggttttggtatcaggatgatgctggcctcataaaatgagttagggaggagtccctctttttcttttgtttgggaaagtttcagaaggaatggtaccagctcctctttgtacctctggtagaatttggctgtgaatctgtctggttctgggctttttttggttggtaggctgttaattactgcctcaatttcagaacttgttattggtttactcagggattcaacttcttcctggtttagacttggaagggtgtacatgtccaggaatttatccatttcttctagattttctagtttatatgcgtagaggtgtttatagtattctctcatggtagtttgtatttatgtgggatcagtgatggtatcccctttatcattttttgttgtgtctatttgattcttctctcttctttattagtctggctagtggtctatctattttgttaatcttctcaaaaaaacagctcctggattcgttgattttttgaagggtttttcgtgtctctatctccttcagttctgctctgatcttagttatttcttgtcttctgctagattttgaatttgtttgctcttgcttctctagttcttttaattgtgatgttagagtgtcaattttagatctttcctgctttctcctgtgggcatttagtgctataaattttcctctaaacactgctttagctatgtcctagagattctggtacgttttgtctttgttgtcattggtttcaaataacgtatttatttctgccttaatttcattatttacccagtagtcatccaggggcaggttgttcagcttccatgtagttgtgcaatttcaagtgaatttcttaatcctgagttctttcttttctttttttttttttttttgagatggagtctcactctgtcgcccaggctggagtgcagtggcgcaatctcagctcactgcaagctctgccttccgggttcatacaccattctcctgcctcagcctcccaagtagctgggacgacaggcacccgccaccacacccagctaatatttttttttttttgtatttttagtagagacggggtttcactgtgttagcccggatgatctcgatctccggaccccgttacccaccagccttggcctcccaaagtgctgggattacaggcatgagccaccgcacctggcctcttaatcctgagttctaatttgattgcactgtggtctgagagactgtttgttatgatttacattcttttgcatttgctgaggagtgttttacttctgtttatgtggtccattttagaataagtgcaatgtgttgccgagaataatgtatattctgttgatttggggtggagagttctgtagatgtctgttaggtctgcttagtccagagctgagttcaagtcctgaatatccttctgaattttctgtcttattgatcttctgatattgagagtgggatgttaaagtctcccactgttattgtgtgggagtctaagtctctttgtaggtctctaagaacttgctttatgagtctgggtgctcctgtattgggtgcatatatatttaggatagttagctcttcttgttgcattgatccctttaccattatataatgcccttctttgtcttttttgatatttgttagtttaaagtctgttttatcagagactaggattgcaacccctgctttttttttttttactttccatttgcttggtaaatattcctccatccctttattttgagcctatgtgtgtctttgcacttgatatgggtctcctgaatgcagcacactaatggatcttgactctttatccaatttgcccacctttgtcttttaattgggcatttagcctgtttacatttaaggttaatattgttatgtttgaatttgatcttgtcattatgatgctagctggttatttagcctgttagttgatgcagtttcttcatagtgtcaatggtctttacaatttggtatgtttttgcagtggctggtaccgatttttcttttccatatttagtgcttccttcaagagctcttgtaaggcaggcctggtagtgacaaaacctctcagcatttgcttgtctgtaaaggattttatttcttcttcacttatgatgcttagtttggctggatatgaaattctgggttgaaaattcttttctttaagcatgttgaatattggtccccactctcttctggcttgtagtctgatgggcttcgctttgtgggttacctgaccttttctctctggctgcccttaacattgtttccttcatttcaaccttggtgaatctgacaattatgtgtcttggggttgctcttcttgaggagtatctttgtggtgttctctgtatttcctgaatttgaatgttgtcctgtcttgctaggttggggaagttctcctggataatatcctgaagagtattttccaacttggttccattctccctgtcactttcaggtacaccaatcaaacataggtttggtctttttacatagtcccatatttcttggaggctttcttcattccttttcattctttcttctctaatcttgtcatcatgctttatttcattaagttgatcttcaatctctgatatcctttcttccgctttatcgatttggctatcgatactcatgtatgcttcatgaagttctcgtgctgtgtttttcagctccatcaggtcatttatgttcttctctcaactggttattctagttagcaattcctctaaccttttttcaaggttcttagcttccttgtattaggttacaacatgctcctttagctcaaaggagtttgttattacccaccttctgaagcctacttctgtcaattcatcaaactcattctccatccagttttgttcccttgctggtgaggagttgtgatcctttggaggataagaagcattctggtttttggaattttcagcctttttgcactggtttttccacgtcttcgtttgatgttggtgacctttggttggggtttctgtatggatatcctttttgttggtgttgatgctattcctttctgttcgttagttttccttctaacagtcaggcccctgtgctgcaggtctgctaggatttgctggaggtccactccagaccctatttgcctgggtatcaccagcggaggctgcagaacaacaaagattgctgcctgttccttccctggaagctttgtcccagaggggtacctgccagatgccagcaggagctctcctgtatgaggtgtctgttgaccccttccaggaggtgtctccctgtcaggaagcacagaggtcagggatccgcttgaggatgcagtatgtcccttagtagagctcaagcgctgtgctgggagatccgctgcgctcttcagagccagcaggcaggaacatttaagtctgctgaagctgtggccacagcagtcccttcccccaggtgctgtgtcccagggagatgggagttttatctataagcccctgactggggctgctgcctttctttcagagatgccctgcccagagaggaggaatccagagaggcagtctggctacagtggctttgcccacctgtgccagttcgaacttcctggcagctttgtttacactctgaggggaaaaccacctactcaagcctcagtaatggtggacgcccctcccccagcaagctccagcatcccaggtcaacttcagactgctgggctggcagcaagaatttcaagccaatggatcttagcttgctgggctccgtgggagtgggatccactgagctagaccccttggctccctggcttcagctccctttccaggggagtgaacagttctgtctcactggtgttccagctgccattggggtgtgaaaaaaaactcctgcaactagctcagtgtctgcccaaatggctgcccagttttgtgcttgaaaccctggaccctcgtgatgtaggcacctgaggtaatctcctggtctgtgggttgcgaagactgtgggaaaagcatagtatctgggctggaatgcaccgttcctcacggcacagtccctcgtggctttccttggataggggagggagttccctgaccccttgcacttcctgggtaaggcgaccacccaccctgcttctgctcaccctccatgggctgcacccactgtctagccagtcccaatgagataagctgggtacctcagttggaaatgcagaaatcacctgccttctgcattgatctcgctgggagctgcagaccagagctgttcctattcggccatcttgccagccatcagttgtgaattctttatacatgttttaattcattcctaattgccctgttggacattactgataataaaatgcccccaaaatttggctttatttacataacctatcagtagaaagttgacaaaaatacatcccccattgcttttactgtcgatttcagattgatagtattattttaatctaaactaatgcaaataaaggtatttcaattcataatgtaattatttatgaattaggaaattacatgcttgttgatttgaaaccttcattttttaaaagtgaattgaaaaatgcttaattaccatgtgtattgcctaagactattattcgtcttttaaattttattaacacttttgagatattgatttttaaaataaactcactttttcagaatagttgagcaaaggactattcaggttatttgactattctggttgtctatcatatatgccatatatacattacaaattttcaaaaaatgtcaagtattcattaatattaattattaatatttattgatttattgctgtgtacaaggcactatgattggtatgatagtagatacaaagatgaatcagatacacaccctgacttcaaggatctatccatttacaatgagaattaaaacttctatataagtataatataaactgaacatggtaaggccccagaagagttcaaagtggttatggaacctaaaggatagtccattagtttcctattgctgctgtaccaaatggccacaaactcaatgtctttttttttttttttttttttttatatggagtttcactcttgttgcccaggctggagtgcagtggcacaatctcagctcactgcaacctccacctcctgggttcaagcaattctcctgccttagcctcctgagtagctgggattacaggattacaggccgtcaccaccatggctggctaattttgtgtatttttagtagagaagaggtttcaccatgttggccaggctggttttgaactcctggcctcaagcaatccaccagtcttggcctctcaaagtgctgggattacaggtgtgagccactgcacccagctgtcaatgtcttaaaacaatacaaatgtattatcttatagttctagaagtcagaagttcaaaatatgtttcattggactaaaaccaaggtgtcagcaaagctgcattctcttctgaaggctctaggaaatactccattttcttgccttttctagcttccagaggctgcccacattacttgactcatggcttttccatcttaaaagctagcagtggtcagtcaagcccttctcatatcacatcactctgacactgactcttcttctaccactagctgccactttgaaggacccttatgattatgttgcaccaacatggataatctattcttaagtcaactgactagcaactatctacaaccttaattttcctttgccatgttacataaaatagtcatagtttccatggcttaggatgtggacatcatcgtggagggctattattctgcctatcacagagagttaggaggaagacgtcttggggaggggatgggccttggaggatagatagaatgtgtgcttgtggaagtgggaggaggaattcagggaattacattccagatggaagggataatgtaaatgacagaggctaacaactgaggtgggggatatatgaacaataaggaaagttagtttgctgacagctgaattctgtaaactttttttctgtaaagaaccaagtagtaactattttaggccttgtagccgtattttctctgttgtaactattcaactctgccattgtagcatgaaagcagccatagataataagtaaacaaaggtgtagtgttccaataaaactttgattctaagaataggcggcagtccagatttggcccatggctatagttttttcaagtcctagcctagcacataaataatatttttaaaagtaatggtaaataagtcaggacttggttatagactgtcttaaatacatagcaaaatgttctggagattgtttttagtagacagtaaagagccagtgatggactttcagcaagaaatgagtagactcataactgtacttcaggaaacgttgcctggctagcactagggtgtaaggtaaagaagggggagcagcagtgtgaatagggaagctttaacactggtatagatgcaggtaatgggagcttaaactagaatagtgaagaggaaggaaaatggcacagtaacttcctaacttgtcaccctacttccagatttccctacagtctattctctagtagccttcaatacataaattagaccatgtcactcccctggtcaaaactctccaatcatttccaattacacttagagtaagatccaaactctttaccattccttatgaagaccttcctttttggccctaactagctgtctaacctcattttctaccactcttcccctgctgactatataccagtcatattagtgtttttgtagttctttaaacatgtcaaactacctcaagacctttgcatttgatatttgatatagtttggatatttgtccccccagatctcatgttgaaatgtaatccccaatgttggaggtggggcctggtgggaggtgattggatcatgagagtggattcctcctgaatgggttaacgccatcccgttggtgctgtcctcatgagagtacctgagttcacaagagatctggttgtttaaaagtgtgcagcacctcccccaaccttattcatgggctggctgtgtgacatacctgctcctgctttgccttctgccataagtaaaagctccctgaggcctccccagaagccaagcagatgctggtgccatgtttgtatagcctacagaatcatgagccaattaaacttttttctttattataaatttcccagcctcaggtattcctttatagcaacacaagaatagcctaatacactgttccacctgcctggaatggtattccttcagaccttcacaagactcacgctttcattttattcagggtttgtttgtttgtttgtttgtttgtttgtttgtttcttagagatgatctaactctgtcacccaggctgcagtgcaatagcacagtcatagctcactgcagtttcgaactcctgggctcaggctattgtcccactatagcctcccagataactaggactataggtgcacaacaccacacccagctaattttactcttttttttttaaagcgatggggtcttgctgtgttgcccaggctggtctcaaactcctggccttaagtgatcctcccacctctgtctcacaaagtgctggtattataggcatgagccaccatgcccagccacaggtctctgctttaatgttgcagaggctttctctgatcaactccatcatcactaccactcattcttgatcttatttttctaataggacttattggccacctgaaattatgtcttctcactagaatataagcttcaggaaggcaaggtcctcacttgtcttactgctatagcctcagaatttactacagtagttattcaataagtatttaacaactaaatgaataatattgcagaggtaggttatataaaactagacaataattgacaagagaaacaatgatgaagagtaaaaatgacactggatttttgatcctggattattggaggttggtagaaccattaaaaatcaaggagtcagcaggaaggacagatctgggaggttagggtgggggaagttccatattagacatcaagagatgccagttgacatctagaaagagattgggagaaaggtcagtatttgaagatgttgtttaggggattcttcatgtagtcttgatggttgaaaccctaatattgtagagaaagtatataacaggagtgggaggagaactcatttgggacagttcagaggaggaagaggggccagatgaggagcagtcaggacgatgggagcaaatgaagagtagatgactgggaagagaggaaactcatggagaagggaatttcaaagaaggagtgataaatgctgataacaaggggacaacatgtgaaaaaaggattggctgaaatcgtaaacatttgtgacttttagaagagaaatttcagtagattggtgagggcacaaatacaatttactcgaacaccattttgaatgtcaatttaatctttcttttatgattcatatggcatttcagtacctcttaggacctcttggtcatttcataaatattggttatgtaacactgcagtttaaaagatacaggattaagaaaaatggtataggatattgtatattgaaaatttgctaggagagtagattttaggtgctcttaccacacacacacacacacacacacacacacacacacacacacacacgaggtagctatagaaggtgatggctatattaatttgcttacttgtagtaatcatttcaccatgtatttgtataccaaaacatcatgttgtacactttaaatacatacaataaaaatgaattaaaagaaaaaaggtatgggaaattccactgaatctatactgatcctgtaacatatgttaaaagttacttgatttggacaaattcctgcttatgcccagatttctgtgactttctagtgagatgtgctctgatagctgtcatcgaagtgtggtttaactgtatgcatagttttgctaaattgagaagtgctatcataagagggaaaatgttagttaggccagcaatatttttattttattttctgctgatataaaaaaaaagtgttaaactttatttttgttattttgaaaagacctggaaagaatgaataagccggaaaaactgctcataacccaccatggagaggcaatcgtcatttacattttggcctaattacttttagtccttttctaacttgctaacacttttgtgtgttgtttgtttgtttgggtttgggtttttttggtgttttttgttttttgcataatgaaagaagcagcatatagtggctaacagcatgggctcaagaacgatattacccgtgttcaaatcctacctctgcctcctacaatcaacataatctttgcgactttcttaacttctctgtacctcattttcctcacctatgaaatagaagaacaactgattttttataagcttattcattctagtatccagtatccaaaacagaattgatcctatactctttccacctttccaatcttatttattctgttttttcccttaattggcactcatttggaaggcttcctacctcttttatcattttatctgtcattctcttgatgtcctgtagttctgtcatttttatttatttgcaaatattgtttacaaatataatctgggttggaagccaaccttactcctggaaactgaactaatatgagaaactgaggaacccaattgagaattatacttgtctataatggccttaaagttgcattgcagtatgccctcatatttaagtcaaatatggcctggatctgttctaaaagaaaacaggataataaactaagtaaagcatgtgattggctgtatcacagttattatcccagaaagccatttaccatacagtgataatcaaatgactggatgggctgttaacagtaatatgtcccttagggcacaacattacaactgtgtgtgctatgtgcagactatgatgacagaagtttctaaatctagcctaactgttaactgtttaagtaatcaaaattcctatggaaaacagtttcttcttttgtttatttcagaaaaggcttaacatttaagtatctttaataaaggggtgggaaggaagatcatcttgttagccttttggttaaagtcattgtcaagtagcatcaaggctgaacatggtcataaaagatagaataccttccctcttagcttcatgattgaaaacaaaaagaagccctaagttcttcccattgaacacaatgggccctttgggtatgacaatcacagttctcatatctcccagagccaaccttgatttcagatgttttggtactcttgcaattactctcctgaattggagctcagaaaaaaataattgaagtacatatagtatcctttctttgtgagcaagttttttgttaaccatatcctttattgaaaatgtttttgccctgtcctaatattgtaatgtaagttgttattcaaaaatggatctctctttattgataaggtgccgataaggttctgtgaagtgtattgacgtactttggcttggagagttattaaaacgtaaaatgctattgttttattgcttgagtaaatggcgaattgacattaactgaaggaaacagaccactgtaggtttttctaagtatcttgcagtaaatcaacctccaaagacttccttaggaagcacgttgactttaaaaaatataagtgcaacacatgatcatagttctaaaaccacctagctctttttttaatccaaagataggaaaaatatatcagtatagaatatggctttctgtagatttagagaaaaagctcacctgtttctaatctaatcagtcttatagttctttgtatgttttcatttgttcagggttgactaagagtatggttgcatttgtgtaacaacttgccttagctcatcttaagttttcttctaaagagtgtgtaattatttaatgcttcccaaatagaagtgcagattttgttcatatattttctgaatttttaactataccctcttttttattctttggagtaaacctttgtttgttttctctttaataaaatgcagtgatacaattactgcaaaaagtttacttgcatattttaatctgtaacccaatcacagtttaaagtaataattcctcagcgaaactcttccagtaatgaatctgaaacttaaattttaaggcaaatgcaaaggaatgcagacctgaataataggaacatttgttatgatacagcaatgtcatcctccagcatctagggttatttttcaaatgtacaattcaggattcaaagctgaactaaatttgactaatcagacatgatttatgttctaggtttaaccatggttggaaatgacagagtaagactttaccttccaattcttttctgaattgttgaggaggttgtagtttggtttaagacttggtaacccagtataggtgtaaagacaaactctagggagcggtgccttatttgattgcttccattttaactgaaatatctgagctacttatgtctcaagaactgaaaagcttaatgaaacatacacatttataaacatatatttttaatactcaaaggaaatatcgccacttcccaaagacctgatagatgtactcaaatcattgctatggagcatgtttgcatttgggaatgtaacttaaatgttttatcatcgaaatatgtttttggtgtttgtgttatttctgtataccattagtgcctaaatcacaacacatagatatatatttaccataatatcacattcagaaaactacaaaggcaagcaaatgttttagaatgtaccaggcatctcttctatttagttgctgacttgccatgtgacatgccaaatttccccattgtaactctactactgcccaatgatgctacagacacttaattggtatttaaaacagtttgggatttccagattaaagatttcacagaagcacaaattttagtatctggctttctgtctagtggttacccttagcacacactgaatgtaaacttccttatatataactgtaacgtgttaagactgtgaagagatcaaaaaggataattatatgcagttataactgtcatataagttaaacaaatgcaattgcaaaggaggcaattgttaagttttgttaaaacacgattatcttatttgagtggaagccaaaaaaactttgggcctttgtgctctcctgttatagcagggctctgttatgtgacctagatttcaaatctctgtagtatttcctgtagaaaaacaatgtattccttctctgcacacctaccactaataataaaatgagtcagctacatagaggcactatctgtgtaaagtttttaatgaaccttttattaatgaaaaacaagtacatagtgctataatactgcagatgagttaataagataagcataattaagaatctttctagaaggaaatttctcaggaggtaaatatttaaagatttactcttaagtttttttaaaaataataatatgcttttgtgtgtacgtgaatttcttatttgtgtctgatgtaatcttgaaattcttggtaggcaaaaactgtgactctgacattttactaagcaatttttttaatctattgtctcttagaagagtctttcctgctattacagtctaccatatgatctcattttgtaacgggtattgaagctatggaaagagaacagctgtccatttctattacatgttaagtgatgtgacagatttcagcctttcctcttctctcagccaatagtgtaaaagattagttgtaaaatttttttttctgtagcccattcaggtttcgatgatgaccgaaggtcttaggcaaccattgtaccataatgttactgttaggaaactggatcaattccaggtcatttgactgaatacacatcacatgatcaaggcttcccaacaccctgactttgactaaatagcacagctctcatttaaagttacatgtctttaagaaacataagtctacccaaatttgctgcactaatcgaaaaaaaaaaacaataatttcagctgtatctaaaataactgaacatctgctttacaagtgaaaaactgatctagctatttctaaaggtacagatgtttacattatgtgggcaaaacaactgaatgatggacagaatgtttttagcatttatttgaattgttgccatagtctcagagcattagtgtaaaacagtctcctttaggttctgttctctccatcagtcgtatcatcacttctactcccttcctttcaccaacagatattgattgagtacctgtgtgtcagacactgtattgaatgaggaataaaacagacacagtcttcctggaacatatgctttttagggaataactggacatttttttgaaagcttactgatgtaattacatatagtggtaagtgttctaaagagcaaaactaaaacactacttatttattcagcaaacatttttgagggcctatgatatgtcacgcattttgctaggcccatagtatgcaaggatggatgaaacagacatgatccctacctttatagagcttatgatttaagttggaaaagcaaacaataaacaggaaaatcaatatatatataatttcaaactgaggaagtgctgtgactgtagtgaacatgttgctctgatagaaatggaggaaggacaagaaaagtctgtcttcatagtaagatttaagttaagatttgaaagatgagtaggagccaaccatctaatgagttaaggagaaagcattccagactgaagcaaagagctgcctactcaaagaaatgaaaggaggccagaacagatttacttattataacgaggaggattgcagacaggatcagcttttgagaaataaattaaaacttaactttggaaaaaattaagtataagttgcctgtgaaacatttaagtcaagatgttattggcaagttgtctataccagtctggagtcaaaagaaagggctgggatggagaaataaatgtaagaatctttagcatatatatggtttttaaagctatgaaagtggtgagatcacctaggaggaaagtacatgtagggaaataaagaggatccaagacttaacactaggaacctttagaggtctattgaaagaagaaactggactaaaaaggagtgttcagaaagatagaaggaaaattaggcaaatgtactattatagaaaccaagaaaaatggctttaaatacatgtgcttttcagtagttaagtaactgtcctgatagtaattttttaaaattttctcaataaattataaaagactccatcaccattagtattttttagaaccactttctccaaaaagtggaagctgtattaactgatttatatatatatatatataaatattttattatactttaagttctaggttacatgtgcacaatgtataggtttgttacatacgtatacatgtgccatgttggtgtgctgcacccattaactcgtcatttacattaggtatatctcctaactgatctctatttttaacccacttgccagattagccaactcatccattctcgctataaagcacattgatgcccatgggcttgtgcctaagaagcctctccctggtactaccatggacttaaactgctaccagttaaaaaatatcatttttattttcaaaaggattggtgccatttgtgcttattataaattagttatatgaatatgcaaagaaaaagttgtttctacaaaaactaagtagaatgctttagagagatctgataatggtgagttaatactactgatggattgtaaaggagtcatctgtgaaagattgggagaaaattatagaagtctagaaggattctgcccttggattattttataaccattcttaattctcaatccactttaaagaaaccccatctggaaatgagagctgatatatttttagtatgatttctgaacaatacaagaaccctagaactagaagaacaatacagaacactaatcagaagtcagtcaacaaagacaagactttgacctaaaaaagattggaaaatgaatatatatttatgtgttttgatttaaaaatatataagtatataaaataaaaatatatccataagcatatgacactgacagtaaatcttctactgtatctaatacagataaactttaactcagtttatgttctttaccaaaatgtattaataagttatcattgaataaatgaaatcttacaatattagttaattcctttcctttcatgcttctgatatttaaatacctcaaacaaaaaaatgagtctttggatattttgaattttctaaccatatgcatattgtgtttctatagctagcctttgtatttctttgctttaattatacagaaaacgttttaaaatgtatttgatgacacatcacataaaatcattataatcccacctttattgttaacatatagccacagttaaggttactaaagtgtacttctcaagtagaaaatattataagttaaaggtgttcttcccttattttctgaaatcctctttaaacttaatttcaagcctttcccaagatgcttagaggacatgagaaagagtgatttttaatactgctaccttttaaatgtcagtctttattgttctatacatttagctgcaagcatttgttttttatcaataatgttttcaaattaaaattccatatttaatagtcaaattgtcagtgagccgtatgggatggcaagtgagcccacatcacgttcacacaaatgttggataaccaaatacagtgttggtagtacctacctataaataattacattccattctattatgtgttgcttaggaggcagcttcctgccagagatatgtacactgctttgagacatgattattatatctagcatcagaagtctgaggtcatcagataggaaaaataggaagacaaattttggctcaattgtgagcaagtatcttggacaattagacccattcaaaaatatgaagctccaagtttaccatcattacaaacagagcctggagaaatcacaaaatacttgtagacatactgggtaaaaatggaacttctgaaatcttttctaaatggctgctgcagagcattgagtattttgtgcaataagcagaggtcaagggagtgcattggagactgaaatccagcccttgctgtgttcactcaactggatgctctggtacaggactgtgtttcctagaagaaagagtgttttttttttaagtaatttgcacagaaggaacattagccctacaagttccatgccctcagagttgcatcagctcaaaggaggcactatgttctagcccttgcacacagaagtggtgccattttcaacacatgatggaatttttttctttagtttttgcaacataaacataggctagcagtggccctgtgtttatacatgctggtttttcctcccatttccttccttctaacactaagcaaatgaaatgaattaaatattcaattcggaaaataatttttcagaacctagtatgactgaggaagattcagtaccctcaaagagctagcagtctgtgggaagagaggagtaaaagagttgtgaaaactattgtaatgcaaagtttaagatattaagtattttatgaatggtacaaagagctaatagctcagataaatgagaaaaaatattttaaaatcaagaaagcatttatagagaatgaaacatttaatgtttgactctgagaaattttgaatggcagtgatggaaccaaagtgaggttggggtgaatgggagataaaggaaaactgtcataattgaaaaacacactgagagagagatgagatgcaagattgaaacatctcattatgtcattatgagcaaccacaatcttgagaaaatatctctgtgaattattaactatgtacccaattgtgctgataccctagaatccccagggtctctgacatacttatttcaacaaacctggtaaccttaatatcttaattaaccttaatccactcttctgttgtctttttgtttttgtttttgtaatctatggcagacttggtgttttgccctagccagcctgttgtattagaaactgtaaagtcagacagttgccctctcaggggtagcctgcctcacagagtggccacccaccccagttctggtcaatgagttataaagtaaagtctgcttagaaacttctgcttggggaaacttttaattaatggataaggacagatggagctgggaccacctcttgttctttcctgccttcaatacgaatatgttgcctatagcactgggggctttttacgcccccaagacgaaatgtgtagggatcagccacttaacacctaaaggatactagagtagaaagatgaaaaaacctgagaccttcatgctgtgtctagcaacctttaggctccttaaaaataaatacctatttgttttcccagctacttgggttatctgtcatttttaccagaaatcattcctaactaatatgccacatttttttctaaatccctccagacaatattgctttttaaaaaatgttgaagatgtcttacttcttgggacataaatcctcaacaaaccgttgttaaacgtttattatgcaccaaagcctgagctgtgtaccagaaaatgacacaaagatggataaaacatagtcattgtccacaatcatgttttccacaggagaatgttaagtgctgtgatagaaactggtacaaaccacagaagtaccatagaggaggggaagatgaagtcagccaaagaaattaggagagtatgcacagaggaagtatcatctaagctgattctagattgatgagcagaagctcacaaggcagatgaaaagaaagagtaactctaggaagagataaatgaaggaatggagtctatattgtacaaatgcagagataaatgaaggaatgtggtctacactggcaaaagcaaaaagttgagttggaacattttatgtttactttatatcagatatggctatatttaaaaatgaattcagattttactccatgcagttaattttataattaatagaaagcagtccatttaaattccatctagtttgaatttataaaaattataacaagaagcactcaaaagtttagattgtcaacttacatattgagatatgtgtctatgtgtgctaatggatgacttccaaagcagattaaaatattaaaattataaggggattaaagtaaaagaagaaacttttaagtgcttttgaagcactcttttataaataaagttttgagttacaagtattttatccagtcattaaaatatatccttaaagaacattatctcaaatcaaagtgtacttaaaagtagaaaaccaaattttttaattagaaaatcttttagagattttgctaattcctcctttgttttattcacatttatgggagtttatattccttgtaaatgtgttatccctctccttttttgtcatcagttaaagcagacacacaattttaagaagaaaagtatgctcaaattttaatctcaaaacttgatttgcccagagaaccccaagatctaacctagtagttagataagttcttgccaaagtacttttcatatcaggatccctaaacatagcagcttttgtgtgtgtgtgtccagtaacttgttaagataattcaataaaggggaaaatttaagggaagaggtagcagaattggtgtctggcttacttggtatgatggactgcatcaattaaaccaaatcaatatgtcgaaataaaaatggactatttataattgcatgcaggtttttttcctgaattaatcagaaattactatcactggtcaaatgagagataattctcatatttcctagcttcttgttatataggtttctttactaagtgctgccagacgaagagaagagataaaagagttgcaatgtagaaattaaatattgtgttctaacgttacaataatggactatatctgactgcaacagcaagcagcaatgagcaacaacaacgacaaatagaataggatgggccaggtgcggtggctcatgcctgtaatcccagcactttgggaggctgaggcgggcagatcataaggtcaggagatcgagaccatcctggctaagacagtgaaaccccgtctctactaaaaatacaaaaaattagccaagcatggtggcccgcgcctatagtcccagctacttggtaggctgaggcaggagaatcgcttgaacccaggaggcagaggttgcagtgagccgagattgcaccacggcactccaacctggcgacaaagcaagactcagtctcaaaaaaaaaaaagaagataaaacgagaaatatgacttgaaactctaatgcataatacacttctaactgtacttaacacctcctaatttctattaataccttttatttgataatgattggttgctataaatctaggctatgctggattgtgtcagcctaagatatgacaagaaggtcccaagccagtcaccatggaaagatcttatcaagggtgtttaggtaaaagggacagtgaggccccatgacaccatgagaagaaataggaaaacagcattatatggggacttgggagaatgagatggaggtccaaatgataagacaggctgtgaggttggaagatgtgcaaattgagaaaagatgagcagaggttcatgatggatcagaaagcttagtctgcaaataaaagatatgtgttcaggccttacttttgcatggtacctgtttacatgctgttttggaaggcatgaccctttaaaggcatttgcagaatagactgtgatatttattaatagttatatataaacattttaaaaataaggtagggaatacaatgagattaaatggttttagaaacactgtttgccttccagcctcacaatggatctgcttcaagtgctacatttatccttcaaatttattttttactgcattgattggtagattttgtttttctgagttcaacctcttttagagaagaatatgagtttacctttacagtgtagtcagactgaagtaattctgtcaagtaagttgatttaacagtgtgcaaaatttggatccatttttattgctgtatttgctcaggctgccataacaaaatatcacagcctgagaggcttaaacaacaaaattttatttctcacaattctggagactagaagtccaagatcaaggtggtggaaaagtaagcgtaagcttcattcgagatctcttctcttggcttgtaggtgactgccatcttgctgtgtcttcacatgacccttctttgtacatgcacacagaggaggggtggggtggctcttgtccctgttcttctgaggacactaactttgtggaatcaaggtcctactctttatgacctcattcaaccttattacttccttaaaggccacacctacaaatgcagccatatagcaggggtgagagctttaccataagaatttttagaggacagaaacattcagtttataccaatactaaactgttaagcaggtggtaattaatcattgaaagttaacgtacaatttattcatgtgtgaaagaaaggtctgagtgcagcattttatactctgcacagaagctgctcttttcattcagcattattgcagaatgacatagtggatgatgactaaagtagaagttagattactatgttttcctctaattgactctatggcaaagctctgaaaccatttttggtgtcagtatccaatttgtaacatgagacaattagaggatttctaaaatctcttttcactcaaaaattctatgcatctgagagttccacttccagtaaggctaagtaagttcctgacagactaaccatcctgcagaaacctattgtaaaccctggacaaaatacaaaaaaaaaaaaaaaaaaaaatacaattgaagcttctggaaagtgaatatgaccaggcaaattctggagatctgtcaaaacttggaagaaggacccaacataggataagtttcctgtttgtcctacttttagattgttggcaggacccagggctgggactaggataaggcaacaaggtaccctgggtgcacctccctcttaaggaggctcagtctcaagtagtgaccctgaacttgcatgagcctgagggagggtgtttccttaaattttgtatgtagacactacttgcctcactctactccaaaccctagcaggacacttagagtggtaaaactgataacttgcagtctttctggcctatagaactagcatatgaagtttgggacaactggaaaggcagaggggaaatcccggaaagaagagcactggagacagagacccccaaattctgcatataaactctgtccaagcttctgggtctgaccccaaactacacaaatatagggcgcattgcaaaccacccagcaaaggggaatggggagggaaactgaactgaggttttagctgctgcctaagaaatagaacttactgcttgagtccaaccaactaaatgacctgccaaaacaaaaagattaacatgcttcagagtagtgtaacagaatccagagtttttacagtataatgtttataatttccagaaaacaatcccaaattactcagtgtgaaaacaaaaaacaggaaaatgtaactcattctcaagagaaaagacagtcaacagatgccaacctccaaaagaccagatgttaaaataaggactttaaagtgcttgttatacctacatgcaatgaagcgaaggaaaacatgctcataatgaatggaaagagaagatctctaagcagagaaatagaaataattgtgtaaaactaaatggaaatgctaaaagtataataccttttaaaaaatcagaacagttggctgcctcttggggcacagaagtagaaataaacaggaatgggatatttctggggtggtggtaatattctataccatgattggggtttgggttgcacaggtgtaagcatttgtgaaaattcagtaaatatacacttaagatttgtacatttcattgtaagcaaattttacatcaaaagaaagaatttctggatagatctcccaactgaagaaatccctaaatcaaagacctgctaacagctagacaaggagattctggtgcgtgactgttgtctctgaaatcattccaaagtgcttactgggtttctatattccatagtgatgagcattgcaggtagaaggaacagtatctggaaaagcagagacgaaaagaagtctatagcatgctccaggaaataactcagtggatgacattaagtgggactgacacagcataaagatgaaaggaagattgcagccattttgtaatgggatttctcatactgcagcttttttaatgggattgcacatactactggttcaggatatttcccctgctttttaaaattgagatataatttacatacaataaaatgtaagtgtacaattcactgagttttgacaaatgtagacagctgcattatactaccaccatcatgccctagaatatttccatcacctcacaacctttccatgtgctcctttgtaatctattccctgccatcccttgtcccaggcagcccttgatttgctttctatcactgtagttttgccttttctgaaatgtggaataaatagactattaagtttctagcttcttccactcagtgtagggcttttgagattcatccttgtatgcgtaatgttgagtggtattccattatattgttatgccacagtttatccagtcaccaattgatggatcttccaattgttttcaatttggagctagtatgaataaaactgttgtgaacattcaaggatgtgactttctggggatgcatgttttcaatggtctttcaagattattgaaaacatggattgacatatgttaatccatccatggatggatttaaatgattaaattttttgagtgataaactatacagtcagaacctatattctttgcagaagagaaaaagcaaaattggggtcacttttatttaagtttataactctttaatgtaatgattattgagttatctaacttcatgagagctattatttgaaaaaataaccctctatgaaggtgtttttattgtttttctttaaatctttttaaaaacacatttaaaattttcaagcatcctcttaaaggcaaatgtcttcagggattttttatgatttttttccacattttacctgaaagtaatgtgagattgttaacagattttcagataaactttttttaatttaaaggacaaagataataacaacaaatgctacatgattagggatcagtggtgtttagagtttcattatgtatgttcatttatattcaaggtcggaaacagcaatgatcttgacttcatttcatctagtctgtgacagcatttctaaaattgtatgtctattgatcctccttaccctgttgtcaaaatccacaaataacagttgtacaaatatttataagttcccctggtgagtacaaagacctcataacaacagtaaaatttcaaatatgtgcaagattcactaaatcatcagtcttcatgggaggcaaatttctacagtcagtcaacagatagttcttgagtgcccactatgtgtgagatactgtcctgaatctgggtcccattataccagatctctgacagtagacattcaacaaatgaaagtcaaaaaagtgttgaagtttctggcagatccagagtctgggcaggtaaggagggagaggcactgctgagagtgttcaggaagttaccacgctgggtgaatgtgagggagattttaacccgttgtaccagagattgcttggatgagattccaaatcagattgagaggtggggtctggaaatttgagtctaccacccccaaacccactttacctgcacaactttactgtgcctaactttggcctcctataatcccttttatgtatctctctcttccttctttttaaaatatagtcgataactggacacaactataagatttcatagtccttttgtttgtttgtttgtttgtttgtttgtctgtttgttttgaggagtctcgctctgtcgcccaggctggagtgcaatggcacgatcttggctcactgcaacgtccaccacctgctgtcaagcgattctcccacctcagcctcccaagtagctgggattacaggcacctgccatcatgcccggctacttttactatttttgtagagacggggttgcaccatgttggccaggctggtcttgaactcctgacctcaggtgattcgccctccttggcctcccaaagtgctggaattacaggtgtgagccactgcgtccagcctgtaaggattctttttttttttttttttttttttgagacagagcctcgcttccttaccaggctggagtgcaggggcacaatcttggctcactgcaacctccatctcctgggttcaagtgattctcctgcctcagcctcctgagtagctgggactacagacactcgccaccacacccggctaatttttgcatttttagtagagacagggtttcaccgtgttggccaggatggtctcgatctcttcaccttgtgatccgcccgcctcggcctcccaaagggctgggattataggcgtgagccaccgctcctggctggattcttttttttctctctgctctctcttcttacctctggcttctcattctcctgccttctttcttcccttttcccctctttttctttgatcattttctctccctcattaactgaccacaagatgaaatagaaaactatttttttaatgttccaggtttattgggagaaaatgtttataatcccatgacaaaaaaaaataaagaaaactaaaattaaggtaggtgccatggcacatgtctgttgtcccagctattcatgaggcttgaggcaggaagatcccttgagcccaggagtttgagtccagcctgggcaacacagggatattttatttctcaaaagaaagaaagaaagaaagaaaagaaaagaaggagggagggagggaggaaggaaggaatcctaaaattagttaagttctttttatttttatgtaacctttgaaatatttttcttagttacattttccttcctagaaacaacaaaaaagtgtcccatctctaatttagacattgtataaaataaataataggagcattgtggtaggcagaattctcaggtggcacccatattcctggttcctggtgtacacacaccttctgtcagttatttaaccaaatactaatctaggtgctgctgtgaagagattttgcatatgtaattagttaaccttaagacaaagagattatcctggtgggcctgacctacatgagcctttaaatctgaatctcgaaatcagagacagagaagtcatattagaaatatgtaaaggactctatgtgtcgccacttaagatggactgaaaatggaggggtcacatggcaaggaatgccagctacttctaggagctgagagtggcccccagctgatggccagcaaaaaaacagggacctctacagctgcaaactgaattctgccaacaacatcaaaaaattaatttgaaaataaattgttccccagatactccagataaaaacttaccccagctgacaccttgatttccgtcatgccatgccagactttcaacctacagaactttcaagaacttggatctaatgggtgggtgttgttttaagctgctaaatttgtggtaatatgttatgcaacagtagaaaactgttgctataaaagtataaacagtaggtatgttttcttgaaagcttttatcttttttaattgacaaatgataattgtatatctttatagagtacaatgtgatgtttcagtatatacatacattatggaatgatcaaatcaggccaattaacattttcatcacctcatatacttatttctttgtggtagaacatttaaaatctacacttttagcaattttgaaatatacaacacattcttattaatgacggtcaccatgctgtgcaatagataaccagaatttatccctcctatgtaactgaaactttgtacctttgaccaacatttcccctttccctgtccctccccacctgcctctggtaacaactattctacttttcatttctatgagtttgactttttaggtttcacgtataagtagaggtcatgtcacagttgtctttctgtgcctggcttattccactttgcataatctcctctagattcacccatgttgtcccaaatgacagaatcctttcctgaggctgacaagattccattgtcataatatcacatccattcatctgttgatgggtgatatcttggccatatcatgatgtttccatgtcttggctattgggagtaatgccgtaactaacatgggcattcagacatctcttcaacatacagatttcaatttctttgggtatatacccagaagtgggattactggatcatatagtaattttagttttagtttttgaggaacctacgtactattttccaaaatggatgtactaatttacattcccaccaacagtgtacaaggattcttttttctctgcattctcaccaatgcttatctttcatctttttgataatagccattctaacaggtgtgaagtgatatctcattgtgattttattttgcatttccctgatgattattcatggtgaatcacttttatacatctgttggccatttgtatgtcctctttttagaattctggtatgctggtatggggtactcttagaaacatggtatggtagtataaagtgaatgacatcccatagggatatttatgaaatcaccttgagacacactaatttctctgtcagttttgaatctagcattttgacttaattagcaagctgctgttcctattttcttagatcaagtgtgtctacctattgctctcaggcaacctgttacaagcaaatggtagtgtccattttgaactatcagacatgctgctattactcttaaccagtgtaaatcaagcttgctggatagcaactttaccacctctaaccactaaatcagttttcctgaatagaacagaaaagagaaggtgcatttttttcccaatagttccattaattcatgttcgacagccactggccccttaatatttttattattgtaataacagcagtgctccccccacccacccctgccttaagacagggtctggctctgtcacccaggctggagtgctgtggtgccatctaggctcactacaactctctgtcttccaggctcaagcgatcctcccacctcagccacctgagtgtctgggactataagtgcatgccactatgcctggctaattttttgcatatttttttcctggactcaagtgatctacctgcctcaacttcccaaagtgctgaggttacaaatgtgagccactgcacctgggcaacagcagttctttaaaaacatcatgttatctttgtgtactgaaataaattagagctcctcccctcttcatctctgtaacccataaggaaaagaagaatatcaactcttggggaaaataatgcaaatatttaagcatattcttttacagcctcactttcaattatcttattgttattattattatttgagacggagtctcgctgtgtcccccaggatggagtatagtggtgtgacctcagctcactgcaacctctgcctcggggttcaagcagttcttctgcctcagcctcctgagtagctgggattacaggtgtgtgccaccacgcctggctaatttttgtatttttagtagagacggggtttcaccatgttggtcaggctggtctcaaactcctgacctcatgatctgccctcctcagcctcccaaaatgctgggattacaggcatgagccactgtgcccggcccaattatcttattaaacaccctttcaacatctttttctaaagaactctcctcccaaattttacatcctattgaatagtaggtatttgtataaatatagatacttggtaaacattgattccttaattcagcaactaagaacctatcatgtgccacaagaatactggcagtgaagcaatgaatgaacagtacctcctctcatggaatttgcatcctagtaaggaaagagagaggaaagaaaccaggttgagggggataatgagtgtcagaggctggagaagaagggagctggctcttttatgagtgactagggaagggatcactgattgaacgacactgagcagaccctgaaaggaaatgacagagtgaaccatgcattcaaagggaacagctctctaggcagaagggctagcaagtgcaaaggccctgaagcaggaacatacttgttatgttcaaggaacagtatgagaccaatgcagctgcagcacattgaacataaataattaagaaatgaagtcagagaagttggagatgggggagccaggtcatgtagaaggaacataatctgactttttgtttttttaatgatgctgcctactagtttgagagtagactgtggcagggataccagttagagtgctatcagaataatctaggtaagggatggaccaatttaataaagctaaaagttgtgggaagtggtcaaattctgtaactaatttgaagacaaagccaccaagatatgctggttgattacatatgggatgtaaaagaatgaaaagggtcaaggatgtgtcctaggcctgagcaactggaaggatagaaattgatggggagagctgagaggcgaggtttgggtgaagagtcaggagatcagtaatgggcaccttcagtttaaaagtgatacaatgatagaggaagagagggcatgcacctgaatttgccagtttggaaatcaggagagaggtccagactggggatagagaattctgggtcacgtatgaatagtatttaaatagaaactggatgagatcacctaacaaatgagtgtacgcaggaaaagaacagaaaggaaggacacagaggagttgaagaaccaagccttggagcagtccaacttttagagactggggagatgagaagatactagcaaatgagcagagaagaaacagccagtgacagaggagaacctagagaaagctgtgtctttgcagtcgaataaactgttccaaggaggtagtgatcaacagcatcacatacagtcataagtgaaggaagctgaggactgaaaattgacctttggacataaagtgacaagagctgttttagcggcatagggcaaatggtagcctcactagagttgatttaaaagagaataaatgaaaagatgggaattgaatgtagacaaatccatttttgtaaggtttttgtaaggtttagttataaagtagagcagagaaatggagtagtagctgcaaggaaatgtgagggcaagacaaagttttgtctttaattttttttaagatagaagataattacagctcatttttatgcccatggtaatgacccagtacagggagggaacatagatgttagggaagaaagcggacaattgttggattgaagttttgagtaagtaagatgggaggattgcatgaggtatgaccacagagaaaagcggagtgtgtgaatagttggtggatgttatggtgggaatctagaagttctctttctgctgcttctgtgttcttagtgaggtaagaagcaaggtcatcagctacaagaggatagggtgaatgtactgaaaggctttttttttaatgaagtacacagttattttatatgaaatgtattatgagataaccatgaaaactatctcttaccataacaaatttaaagtgtttagcttagcacttgatgtacagtagatgtaaaaaaaatgctttactgtaaaacaaaattgggatcaaattttcatttgatttgtgacatgaagatccattatttcatccaaaacaattatatataacttcagaatttctggagaaattgatgtatggggtggggagccctttaaaagtaagaagttgggctgaggagagtcagatgtgttattcatcattactctctacattgattaaatttattagatgactaatcataaccaaagattgttggcaggagagagtatgagaagatcatttcatcctattattcagctctgtctttaggctgatctcacactctcctgaggaaagcttcagcaagttttatgctgagtttcattagtgcacagaataaagtccgttgtatattactgcttttaagcaaaacaaatcaaagtgccttagcccagatcattcccccagcattatataatataaatgcccagaaacaactgctggggaaatcccacattctcatcttcagtctaggtcatgggatcagagttagaatgtaagagaaaacatttaaactggccccttaaatgtctgtacatcagagttcaaggaagtgactccacaatgtagctgagagtgagagaactccaactgtaaaaaaatactgaattttgcatctattgggaagataaatgcagaaaatgaatgttggcatttccccttctcttttattggtaactggtgtagtatatgttggcaaaaagaaatagtgactgacagataaagtagactgtgaaccaccaaataacctctagaaatttttaacaatgatgttcctttaatatattatagcttttcaattgccggataagtgacttctaactagaaatagctcatatctaattacgttaacattttaacttttaaatttgggatgcacaaaatatgtaaaattatatatgtatatatgtcatttgcttttttttcctcaaacaacaatgatgtatataaccaggtggtaaaacaatcaagtcacagatccaaaatcatgtttgttaatacacagcatttttgcaagaccaatattaaggagtgtttaaatcacaattcagaaaatatatacattttttcaattattttcttagaaattattttaatagttgaaatgctgcattatttggttatttataggtggcaaccatctctcactatactagattcctttttcataggaaaattagctagtagttctttttaaattggcactgcagttcagacctacaaattaacttgtacaattgtaaacatgtaatgtctctaaaatacactgctgtgtggtgaagcctagaaattatttcagttccttttaaaagaacattgctcttttaaataataatgcacaaataatggataataatgcacaaattgagacgttgggaatctagtttactttttgtgttcttcaaagagttaggcaaaagtattatttgattgttttaattttgactattggcagtgcaaacaggagttagggaaaagaagcaacaccacagtgcttaaaagcataggctctggcatccaaatgcttacattcaaatcatgactgcactatcagcagtgtgacaatggacaagttatttaaacttctttatccctcagtttcgtctctgcaaaatgaggttaataacaatatctatctcaaattgttgtgatgtacaatgaattaataatatttataaactacctagaagaatgtcagaaatagtagaaagcactatgtaaacatctgataaacatagttgattgttagggcaacaattctttatgcctttggaagctgctatcagtttcatgtaatcatctattggataaaacagcattgctgtcctttgatttttggaactttctgtataacgggaccagggagctaagagatggatagccacagtagtatgtttgagctggcttctactggcttgcaagaactttgtgagccaattgtcaaacataatcattattaataattaaaatatttaaactgaaaattatattaaaagaaatggtaataaatattttaaaacctaaccacttcctaattattttcctgcattttacaattgtctttgttcttgaggttatttacatctgttgtatctaagaattgtatgtcatggtgtattactatgcatttcttcccatctccgtattcagtgacatcacattggtagctcgaaataggcatagtatagtatttacactatgaaactgagcaaatgttgcaaatcaaggcttgcccccacccccaatagctggttgttaaaatatttaccatcacactactggatcagggtcagagtgtcccattagtttctgttattcttttgctgaatgttatcatgagtaaaacagagactgtattgaggaaaggattgtaaaaaaaaaatgtgcttacgccttaacggaggtttcccctataaacactttcctatgttaggcatccaaaatactctaaaatcaccagaaccataagcaatgaagaaagggctgttaatttcattactattaataacaatggtctcctttcgtatatcattgtgtagttacatgttatctaataagggtatcatgctaaccccctaagctagaatggtagctgttatcatcactactatataaatgacaaatctatttatatagaaagttcagattccacaagattattactttcccacggttattcaacttgcaattgaagaacattacatatggattcagattttctgactgcaaatcaagtgaaaattccatttatgtgatgaatgttatattctttaacaaagccttattaattgtgagttagagatatctccccccacacctccatgttccctccctccctccctccctccctctgtccttctgctctgctcagcatgttggatgctaaaagttaaacctatttgagtttgtaacaattttgtaacactaacaaatgtttttcaaatacatctgactctgttattatagtatatttaatcagcccccattgatggttatttagattatttccaattttttgtttttacaatgaacagtcttgtcaataaaacatatctataggataagtttctacaagaaaaattgctggattaagctatatggagatcgttcaacatagtgatgaagatctgggctctttcccctgctagctgtgtgaccttgggaaagttattgaaatttcctgtgcctcagttctctattgctaaaatagggataatagcagtacttctcatagattctttgtgagtattaagtgtattggtacatgtatggtgcttacaacagtgtctagaatctaaccactcaataaatgttaactcattattattagcattgaaaattttagataggtatttacaagtttctcctcataagtgtgttatacttaatacttccatcaatatgagaatgactgtctcttcacaccatcaatgctgtgtctaattaaactactttttaatgtttgctaatctgatagatgaacatggtatctcataataactttttatttctctaattaagcatgaagttaaacattttcacatgtgttcatttgtgtttcatgccctacatgtttcacgttttgcctattttgttatttgttattaatcttattatcgatttgtaggaattctttctgcattagggagttcaacctttttctgtgctatgacttaccttcatcgtgttccatattttttttgtagaacttattcctatttttaataatgtctttatgtcgatttcaagcttcatatgatcaagggtcatgtctatttgtttatcactgtatattgaacatctagcaaaatgctgaacacataataaaggatcaataaatatttaatgaatgatacatgggccagatatgacaaagaaaatatttgatacataaatagactgggaaattagaaaggaactattttgtctggaaatgtaatgactttggttttggatatgttgagttttaggtaacagccactattctaagttgaatgtgtttaagactcttactttggcaagatactcatgaagattttggagtcatcactgtgaagttattgattcaaaacagatgatcactgatggaaagaatgttatgggagggttcatagacaatacttctaatcaaaagcaatttcaggtagttatagttgtcataacgtttttaaaacaaatatgaaaagaaaaaatagaagcattgtatatttccaagtataaagatatggtaaatgtaggaaaattttaaaacaataatgattattgaaaagtatttagataatgttagtcatatccaaatcacttattatgaagaaatgaaacctttactaagggaaaactgagttcatcaataagctggtggaaatcagaagtcctatttttgtataaggtaggctatttgtgtttttagtttgtaattggacagtgattgttttctattagtgaactatcactgagagattaattactatcattttagtctctaggtctgtcttttatataatagattatatgaaatctgcatgaactgtaagaaactattcagtctcctaaaaagaaacacttattttctcagaacagagaacatcttctaaaataagttatacatgttatttaatatgcagggatatctttatggctgcagtcactgaataaccattgtgacttaaatgcctgtgaattagtacctttataagtctgttataaagttataattcttttttaataattgtaaggaaataatcaaggcagaaattctattctgatggcacaggggatgtggtaatccaatgttagtgtcaattttcacatgatcctgtagattaaaagatactgtcttgaaagtgtccactttatttttattagaacgtatctgtgacttaagaaattagaaggacagacacagttgtactgatcagacaaattatttagcgggcaaaaattgtagtcacattagaataacttcctacttaacttttagctgcctttgtcttattgattggaaatcctgttatttctgagcatttttgtcatgaaagcaaggttcttaggtacagtcatcattttcttccctccaggtgaggggcttgtcagtgatgaatgaagtaatctataaaagaagatgcagaaagtgtgaagacagaaaataaatctacttgaactggtgcagcagagcagtttatcatggcgcatctggctgagcatgtgcttgcagtgaacactagaggagacatatagtgacagtcactaaggggcttttagggaagccagtcatttgcttaagccaggctctaggaagtgcttattttctacttataagaggaacatttgttcattaagagagaatagaaacttcaaggtggcctgtgttaatatacaaaggaaatagttacagaatttttgctcaaggtgtgtatgacttgtggtaaaagactggaaataaacacaatgcaaattgtatttcttggttttcataattacaaaaacatcatccttagagttgcttctcaaagacttcacaagaagcaaatggcgatagagtaaggttttatttcattcaaatagttactgttaggccaagcacggtggctcacaacaataattctatcactttgggaggccaaagtgggagggtcacttgagcccaggagtttgagtctagcttgggcaacatagtgagatctggtctctacaaaaaaatttaaaaaagattagtcaggaatggtggcacgtacctatagttccagctacttgggaggctgaggagggagaatcacttgagcgcaggagttcagagttgcaataagctataattgtgctactgcactcttgcctgggcaacagagagaaaccctgcctctaaaagcaagcaaacaaaaatagttaccattcctgcacttttgctctgccccttgctgagacttggggaaaggaagtcaatgatttgttgttaaaggtcggttactttccagagaggtaggctacctgagtcgtgataagccagtgtcaaagaactcatccaaaaattggattaaaatccttagcagtacttggatggaacagaggggtggaaaccactgtgttctagaaacgtaacacccaaaatcagaatgtaggagaatgtggctgcctcaacttggggctgttctcttggtatgatgagggccaaaatgtactcatttacagaaatatggccaaatattgcttgcttacgtcaatccacatctctttatagctaactattctcaatcccattacagaaatggaagctaagtttagcaaattgtttggccgtttatgtttagtgcacaaaattcttaattaacaaagtaaaatgccacaatccattgtaaatcactttgctaaactttcaaacttaataaggaattttgtcttgtccaaaagctactttcaaacccctgctgatctggcactcatgtctgattccctgtggagctgagtgaaagaatgtaaagggagccaattaaagaaactttgagccagaatagacaagcagaggccatcttgtccatccttctgccttcaggcaaaaaccatccactgcaacacaaatttttgcttgaatcctgctgacaaaaatgctcaccacatgtaaatgacaagtcataatccagttattgcaactaaagcagattgttaactgctcaagacttatttattgtgttctaaagatgctgagtatgaaagctcatctgaattgtcttaattccccctttctagaaaattattttgtataagaaatgtgctcaaataattgtaaagatgagggaggtttgtgtccaggaaataaagttatctttatcatcttattaaatatatttttggtttcctttcactgtaggtttaccttatgggtgggaggaagcttacacagcagatggaatcaagtacttcatcaagtaagtacaagcatctcaaccaagtaagcaattttcttcacatctggagagaacctggaagttgcagaataatcagcaaaactaagaaaccttcttggaggttacaaaaattagtaacaagaaatgaagcctcaccattttcgtttcatgtgatttaaatgctaatatcagatatcatttgggggaaaaaacctggtaataatttctagggaaacatcaaaaaattggaacaggatcatcatttgaacttaggctggctgcctaaattcacttgctggctaatagtattagtgtttatgaaaagttaatacctagcaaaaaaatccgttttgtatatctttgaaagttcttaacaataatgctaatatcaacattttttaatgctttaaaatgcacacagttcattctgcaactattttttgagcatttgctgtttgccaggcagtgttccacgccctgcagatatagtggtgaaatatatagactggtttcttgatagcatagaatttacataatagagaggaaaaacagacagtagataaataacttgagataaataggacagtatatgaacaaaccttacctcagtggattctcagaacaacctcttgaggtatgtataccttgtcattttttctgttttatagatgaagaaaataagagtcttgagtagttaccaaaaaatctatcactacttaattaccaagtcagaactagagtcaaagtcttctgaccgcaagattctactatctgcactagactgtcactgataaagacccatccttaaagcctgaacaggaatacatttcctagatgctgaactggttagttttgccctggacagagcactgtgatatacttctaccgtttcctgaaaattccttttatgtcagaattgacatttcgagagcacaaaggggaatcccaacagactcctaagagcccaggggactcctttgtgtatccttttagcaaagtatacttggtatgcattttgggaggaaaagggagacatgtccttgctatcccctttcaaatgtgcaaatattttacaaagcaatatccagattttggattctcatgccccgcaactttacacagttcctacatctctgttaacctcagctttcacatcatatactgaggggaatattacctactttataaagttgtttaatcttaagtacctagcatagaacttggaacacagtagatgcccaataaatagccatcatgaatttacaatatggagaaaccatcgtggaggggaaaaaaaacctgaacaatcatatgaccattaaaaacattgagaattcaaaagctttgtatttgaaaaaatttaaggaaaaactagagataaacctggcaaagtgttttcatgctgaatttttttcttgcaatctctagcatgaagtgattaatcaggcaaaggtgttgtttataacatttgaaagaaaatgaacttttggcatagaggacccaggaattccatgtgcagattacatttagtgccacactctttacttccagaatcagacctcttctggaaggggctctctagcatgcaggattaatcatgtttagtttctggaagatttgaatcactgtactgtaggaatggcaggaaaatgaaaaaatgcattcaaatctgtgttgcatttctttctttctctctttttgatattaactttataaaggaaaagatgagggcatgagcatttactgagcactagcttgtgcttaatagccaggaatatgctaggtgtatttctctatgcattatatcatttaatgctcttaacaatgtggaaagtaggtgttgctgggctcttattggaatggcattatgatggtagtgagctgcatcttgcccttagccatgctttctcctagaaggttccccaaagaaatgcatgattaaaagaaagaaaattagcattcattattaactggggttctgcattcaggatcctttgaaatgtcagtaaatgagtctggatcctgtggggaactcctttacctaaacctagctgtctgtcagtatatcctaacccagagttgaatgtcagaatctaactagtgccttaagagaaaaaaatactaggggcacagttacccaaaacagagaaagcaggaacaagtgatggtcagccagagagttggtttgtctccttacctgttacccagctagcttaagccactgttctttgcagcctggaacaatagccttgggctggtctcccactataagggagaatagagtcccagaagaggagataaaagggagtcaataagccctttggctgccctgggaaccaactcagtgtctgtggaaagaacagagagatgctacatttatcctaaccccattgctttgctcggaaaatatacccccaaagggtgtgttttggaagtccatcaattttttgtttccttgaccttagtcttgacacataaggaaaacagaaaaagagatgataaaataaatgtattccccaaagggccatagtagatcttattgtcttaccatttcattaggagaaactgttaaaagaggctgtagtcatcaaggtcacacagtaataaaattgcagagccaagattcagatccagggttgtctggccccaaagccacctgcacacacacacacacacacacacacacacacacacacacacacacgcctcaccacctctgtatcctcatgttaatatagtatgttgacatgtgacaagaaagacacttcaaacagatcttaatttaggaagagctctatactttatccattttaaaacagcagaatagaaacttggttgtaagaataagaagttgtcttccagagattaaaaaagtcaaagagtagaaataggaaaatctaacaatatgccattacttcttttacccagcctcatgaaggaatggggtgtttggcataagttagtttttttttgttggaacttaaccctattcaagcaccaagacttattttagttaactgttcttgatgaaagtcttactttaatatatgttacacacttccctgacttcttatacagaggccagtgaacaaaatccttatgaacatccatcattatacacaatacagtgagttctacaggggatattacgctgtataagacacagtagagacacagctgtcatctcttgcttctctcagtgtccctgttcctctcctcatgaccattctctttgcccactctccacaagccaccttcttccccagttttgtacttgaggacaggatgccagataatgaggctaatttgaactgcttgtaaatagcctttgaatgtggttctgcaggagtgcttatgtaagtcaagtatgatacataagttctgttgcaggtggatttgattacaggaaggccatctggtatcagggaaagaagagcatgggctttggacttggagaaactttaattaaaatgacactgtctacacaaaatagctaaataaaatagctaaaccttaggcacatttacttaacctctctgggattaatttctccatttataaaaaggaaagtatattagcacttcatagggttcctgtccagaatgaatgagcttgtgtatttaaagagcctatcatagcacctggcccaaaatagacactttcagcaaaggttagccctcttcactccctccccttgctttcacattttggtgggagtttctttatggttcttagctgcattcaactaggtgatgttgtcagataagtaaagtttgcataagcagacatctactatatgtcttttttggaactatttcgttttggtttgtcatttgtttttgttttgttttaatcttcattctcttactaccccaacaaaaaattttgagtctgtgtagcctgtgttagcttttgaggtaagagtgattcatttaccatatagatgatgctttgaaggcaagaaataataagtaatggactcagatcattgctctctcacctctacttaagaatagtgactgaaatcaccctcccagaacaccagaagagatgatggtctatatacacataatctcttcctgaaattggcatctgtcactgccttcccagaaattgaattgttacatctgatggaagccaagcctctggcaagggaataactgtcagtggtgtcctaagaatgtccagatgaacataatcctcattgactatccctgcccatccacatgtccatcacacatatattaatactttgtcatctacttaaattctgatgcaagagaagaaagcattttacctaggatgaacaaatttgatcagtgttggcatcgctacagccagtgtttcatagaattaataaacatatatctctgtgtgtgtgtatgtttctgtgtgtgtgtgtgtaccaatgtatatatgcatatatgcaggtgagcagagcttgctcacttgcctcatatatgtgtaaaaaagaaaatacattatttattagttttaaaaagtatttgtgcattctaggaaattttttcttattttctccttagagagagagttgcaacattcttaaatttaataacaaaccatccatgatcttgagagtgctataatgaaattaactgattaacttgatccatttttctacccaacttcttatctttttccctttgaagttgtatactgttacagatttatagtagtctttggtatgattccacttaaaagttcacatgctttatacatatgttatataatataacaaaattattatgagagttatcaagtttgtagtaaaactgaatttatgacaaattagacatagctgctaattgcttttttgtatccttttatctttctgttgattcagatttactgtgattatcatacttatattaactctatatctgcataataaatttctccaaaattttagcttaaaccaatatgtattttcttactcaattttagagcatcctgaatccaggagtggcttcactggattactctctcactttctctctgggtctctcatgaagttgtagtcactctgttagctagggctgggacttcaagagtggcttagtgaggccgggcgtggtggctgacgcctgtaatcccagcactttgggaggccaaggcaggcggatcacgaggtcaggagattgagaccatcctggctaacacggtgaaaccctgtctctactaaaaaaaatacaaaaaaacattagccaggcatggtggctggtgcctgtagtcccagctactctggaggctgaggcaggagaatgttgtgtacccgggaggcggagtttgcagtgagccaagatcacaccattgcactccagcctgggccacagagcgagactccgtctcaaaaaaaaagaaaaaaaaaaaagagtggcttagtgagctggctggagtatttggtccaagctcactcatgaggttattggcaggaggcttcacttcctcaccatatcatgaacacatagagctactcacaatatggcagctgtcttccttgaagtaagggacaaaaaggacagagagggagaaagacaaaagctacagtgtcttttataaccaatgtcagatgactgatctaccatcacttctgctatgtgaccaaccctggttcagtgtaagaggcgcctacctaaaagtatgaattccagaaggtagggatcattgggaaccatcttagagcatgcctagcagatgccacttcacagtgtatgtaaaatatatgtttcatatgacttatataaataatacaaaattgtctctgtccattacttgctttgaatattcaattataccagcagttcccaacctttttggcacgaggaacccattttgtagaagataattttttcatggaccagggggtagggggacggtttcaggatgaaactgttctacctcagtcatcaggcattagattctcataaggagcacgcaacctcaatcctttgcatgtgcagttcacaatggggtttgcaatcctaatgccaccactgatctgacaagaggcagagctcaggcagtagtactcgcttgcccggaactcacctcctgctgtgcagctgagctcctaacaggtcatgtaccactacgagtccatggcccgggggttgaggacccctgaattatactgttggtgatttttcaaatacatgtaatcacttgcttttaagttacttaaatttggcttgtaattctccatgcattcatttggattgatatgcctttatatcagatcctaaaatctgatatattgttcctcgtattacaaattctattctttatcacataggcagtattattcttagaacattacaaatgcgtatcagtagaacctagaaagtctatgtatttgaataaaacaaaagtttctgtgtagaacagggaagggaaatagattttaactcatgccatctctgtctgttgataatagctgtctcaagtattattttgagaagaattctgaggacatattcaacttcactgatgtatgccttgatcaactggagatgtctgccatgggtttagagggagaagtggtgtgtaggacacatgccacatctttgcaatctttttcttctagagtgtattgctagcacatgacaggaactctgccatgatgaacagtaatgatgcaactattaggttggaataacaaaataaacaatgagaacacccctaccccaaatttcttacaagatgttcagtatgtgagagctttgtttttatgactctacagcataactaagttctaatacgcatggtttctctcatttctctccagtcagaattcattaatgccctaaaatgattgtctatacttgggttaagacagccagttagtttgtttgcaagtagggaagaatggctcataatctataagtgaataaattttattgtttgcctattgtattagttaaaagcttcagttacattgtgtcatctcatttataaacaaaggaaaacacaaaagacaagaattttaaattatcgtttcttaggccctaactttatttgctaagtagagcctagcttaggtaaatctaatgcaattagaaattagggagattggaaaggggaagatggaaaggaaggaatggtttctgaattagaaatttaaagggtactacttttagctttttctaaatcctttacaattattttagctttttttttttttcttttttttgagacgaagtctcgctctgtcacccaggctggagtgcagtgacacagtctcggctcagtgcaacctccacctcccaggttcaagtgattctgccacctcagcttcccgagtagctgggattacaggcaccagccatcacacctggctaatttttgtatttttagtagaggcggggccatgttggctagactggtcttgaaatcctgacctcaggtgatctgcccgcctcagcctcccaaagtgctgggattacaggcgtgagcaagcacctagcttattttggcttttagtggacactgtctaacaccctccttctaaagatctcattaatttgggggctttgattcattttctgtgaatgaggaaatgtctactgacaaattagtaagatctaaggctcactggatgaggtgtcagggcaatttctatgcaacttcagactagataaggagaatatgtgtaggctcctcactctcttttacatgtataagaattctgggcattttattcttaatgaggctacaatgaagaaaccaacagaggacttaaaagatgaaatatggacctttttaaatattttgcccccaaatacttcttagctatgaatgagttgtaaggtattgaaattactagattgcactttaaagctgtaaccatccatgtgacaactggtttggaatattcattacctagcacagggcctggtatttgtagggatgataaatatttatcgaatgaatattgttgttggcagtctgcggaagcaattgatggggaaaaaaataagggctttagtatcagacagagctagcttctaatgtttatgcaaccacttttaagtgtgaccttggtagtggtaagttatttcaatactctctaccctctattcttgtacaaaaacaaggataataatttctatctatctccccagattgttttgagaattgaatgaaatttggggtaaaaagcacctagcaaaataccttgcacataatgagtgcttaacagctgttagttacccctccccttccttattttatactattgctatttgccaatggaggagtttaaaatgacagtatttacacaactgcagatggaaaccagtagccaaaacctacacctgtgccactctctggccagtcaaaagccctgtgataggagcagagacattgcattgatcatgagcctgagacagcttgctcaggattttctgtaaatacctacaaagatatgtaggaatatgaagtactgtgtgagaaattgtcatgaaatgaaagaccaggcagctggcttgggttattcagaatggcaaagcccactaaaataaaaagaacatccagacctaaatattcagcatcaaagccccttttccccctcatttaaccaatgacaggtataacacaggcatgaggcatgttttttcacatttcattgagatattaaaataaattatttggggtttcataaagtactttgaaaactcgtaacctttctgagggttaatacttctatttgaaaggtgtataattgtctttgctgccaggaccctttatttagatttactaacaaatactttttgtcaaactctttcccttccaaatttggttgctgtattagtctgctagggctgccgtaacaaaccaccacagacatggcttaaacaacagaaatttattttctcacagaagtcccaagatcagggcgccatcagggttggtttctggtgagactctcttcctggcttctagatgcctacctctggctgtgtcctcatctggcctcttctctttgtacacagagagagagatatctctggtgtctcttcttacaaagacaccagttccatcagaccagtgtcctgccaaccctacaacctcatctaaccctaattatctccatggagatccagtctccaaatacagccacgctggggtttggagattcaacatatgaatttaggagggacatagttcagtccatatagtagcttctcccaaaaattacatttcataaggtccctagcaacttttttcttcattctgtagattatattcattatagtgtcatacatatatgtattatttttcatgctaaacgtttagcaagttttaggcaaattgcaagagttgatcccaatcggtgcattttccattaggccctagtcttaggggaagaagcagcttaagggaagaagagaagggtaggcagaataatggccctcaaaaatgttcacatcttattccccagcacctgtaagtgtgaatatactaggtcacatggtaaaggagcattaaagttgcaggtagaattaaggttgctaatcaactaaccttaaaatagggagctaattctggattatccaaatgggtccaatcacgtgactccttaacagtagaagagggaggcagaaaaagagagtcagaaagagatatgacagtggaagcagaatttaggatatgttatgttgctggctttgaatttgggagccataagccaaggaatgtgagtggcctggaaaagcaaagaaacaaattctcctctagagcctccagaacaataagacctgtgtgggacttctgaattacacaactataagatagtaaatttgtgttgttttaggccattaaatttgtggaaatttgttactgcagtagcaaatgattacagggagttagaagtagagtggggagggtagtggtcccactactgtgtgaccttggatggggctttgatactctgagcctcagtttcatcaattgtaaaaactgtagagaaaaataaggtctgtgagatttatatgaaaagcaaattgggaaattggtatcaaagaatgttgtaaagtacaaaatgctttcctgatgtaaagtcttacccagctgccacatacctgaacatctgtatcaaatgaatgatctcaatattaacagggccagaggtcttctttgatcatgcctgcactttgttacttagcactggtattaagcaggtacctctgtgaaaatctccatccctctgttgggtatctggtgcctagaaacatggctttggctgcattctcatcatttcaaagactaaaaattccagtgtggtaaaatcacttctacggtttagggaccgaagggaagcgtgagctgttagccaggccacttaccatcatatttatttgtctttagtaaagttttatactctaatagttaaaacaagatttgcttagctaaaaatagtatttgcttgatgtaaataattttaacaaaacctgggatttgagtaggttgacatataactccagctgtatagaaaataaactagtcaaaatggtctgaattatcacagtgattcaactgttacatacaaccaaatgtatgagtagacctttggaagttacttggatatgagaatattggtgagaaggactagtagtgttagttatttggtgactttggagctatttaaatcttattttaataatgatcaatttatttatgcatattttcaataatttaggacagtacactggattaccaagtcggaagattgttttgtctgatcctccattataagtaagcttgtctaccacttttgagtatttttacccagtgatatgacaatagtaatgtatcagtgaaatgtatccatgcatcaaatatttatggacccccctttctgtgagcctgacactggggctataaagatgagtaggacacttccctaccctccagaaactaacagcctattagacaaaaatagatatatgaagaatttgttgctacatgatgtaaaaaatatgactgctggcacaaagcctctgactcaggcttcatacaagtactttttattcatggtcatccagataacaattcttatgcatttcgtggtatgttagtttgttttcacactgctataaagatatcacctgagactgggtaatttataaacaaaggagctttaactgactcacagttccacgtggctggggaggcctcccgcaacttacaatcatggcagaaggggaagcaggcaccttcttcacaaggcagcaggagtgagaagtgcaaccagaggaaatgccagacgcttattaaaccatctgatcttgtaagaactcagtatcacaagaacagcatgaaagaaactgtccccatcatccaatcacctccctcccttgatactggggattacaggtccctcccttgacacatggagattacaattcaagatgagatttgggtgggtacacagagccaaaccatatcatatggcaaatactttaaaatatatatataatagctttagacatatcatttataatcaatgaactagtcaatacatctttaattaattttatcttgtaaagctgaagaacccctttcagatggtcacttaatccattccagagcctccctatatattgttactgacaccaacccagataacagagcctcagcgaggagtttaatataatggttaaattctcagaagtcagatttgggtctagatcccggctctaacatgcactagtttcatgacctggaataagttatttcacctttcttagtatcaggttcctcatacagaaaataagaatataattctttcttgcctttaatttatactaaggtcctaaaagacagttaattccatttagtcacaagtctaagttggcactattagaaacaatcagtatttaaaagttcatgagaaaactgtagaggttgatggcatgtttttatcccataattttcaccataattgaaggcttttctttgtaacactcactgtcaagtggctttagcatttatacatgacggaatcaataatactgacaaaatacttcaagacattagagatggtctcataaggagcctctcaaagtcccttccaactttgtgatttttacaaatcattctgtagtataatatatatgcttatatttaaaatttgtagtgtagtcattttaactctgatagataaacataacattagaatcatataaattagttgaaaaatatgttttaaattttagttttttaaggttttaaatttgttaattaagaagaatgtttagtcagatgtttattaaacttcttttgttgattaaattaagtgaacacctgtatggcttgtaatacaattctattttaataagaacactaaaaattaaagtagcttctacattttatgcacttctactcgcagggggaatttaacgtggaaacgttgacagtggtcttatgaacttgtttccagttaaatttagtattcgttaatctgtattctgacagtcttgattattgatatttaaagtagcataaaaatatatagctattacttattttctgtattttagaaagataggcttttagtttatagaagttgttcatatatttattgagaaagtagtagtcatggcttcctcttgaaatattctcgtcttgcttgacagtgatctagagtgacgctatctgaaataacaaatcatctgctttcagtgacttcatgctcacaaatcaatgcagggattcctggttgatgggtgtagcttttcttcaggtagtgatgttgagacccaggctcctcccatctcatgtctctgccctccctaatggcctcagagtcctctacattcggttggcggataatgagtgagagtagagaaggcactccagcttcttaaaaaccctgacccacaaaagataaacatcaattctgttaccttctattgacaggaactaatcacatgctcacataaagatatgaggagagctgggaaatgtagtctctgcctaggcagctgccacctggcagcaactctatggtatggaatggagaacataaatttttggtggacactgccaacaggtatatgaaaaagtacaaatataccaactatacaatcctatataattgtttattagtatctgataattcagtgtataggtatcagtgtcagtaggacatgttctttgtttttttctgttttgtttgtcctattatgatgaaaaacagcatcaatttttaagagttacccagggctgtactctgtcactacagagttgtttccttctttgaaaaattaattatattggctttgtacctgacatgttttagctctatatagcaatccagcctgtggatattatttgaaaaaatgtaattaatattttccatacttgttcctcaggaattttcttttcagtgtttatcttttagaagtctagtgacaacaatttttttatacataagtaatatattacaatagctttagattcttataatatgatttgatagctcagacctaaatatttttaattaattggaatttaagattttaaaagataaatgatttttaacagaaattaccataaatatataataaaaataaaatttgtcctctagactgtaaagatttggatgagatcctgctaatatttgatcagagcctcactggatttccaaatgcctaattacaaaatgctcaaagtgttctgtgatatttacaaagttcactaatgagaaatatttattttgattttagcggcatatttccaaaattatgtaagaggatactccttatataccagtgggaacaaaatgcctgcaattttctcttaaacatattttagaatagatacttcctattactaatctgtaattattctcataaccagtgtttatataagattatatgctgctttatcatggtttggttactttttaataatctcattgacaaggttcaccttgtgttcctaccttctcatttgttttcaattgggattagtttttaagtataaatcttttattgtcattactacttgcagtttatgcccagttgtaaaattttccagtgattcaaagttactggtgcctgaaacaaattatattaacatatagttacttatttgtctttgttttctgttttatataaatactatatgcatacaattatcaccccccccccaataaaatgacactggaagttaattacttttggctctttattccacagctttatcttaaacatgataaaatagtatatgcaaattcacaatgatgtataaatagtgccatctatgatggaagattaacaaaagaatgtctttcatcatcacagacggttataagaatgaatttctacagaacaagtgccctttttgtcattaaatcctttttgtttaacaggttgtcctaatttttattttgaaagaaaacattttgctcctttagctaggaggtaagaaacataaggagggtaattataatgggatttaaataattcacttacatttctatgccaataatataaagcatgttctcttaggttttttaataagctctaaaatgtgtctttcagtttactaatattattttttaaaacacacaatactgttatcttcccaaatcgaatattattgttttccaacaacagatttggcaaccattcagaggcaaatagtattatgcttttgagattttcaaatatatctgaagtgctgttgactgctctccaaatcaggtcagatgcactgtctctttaggagaatttgccagaggtactgtttgttcaaatggaaaattttcatgttccatagtaagcttcatttattttccaaacctctaaattttttatactaaattttttatagcaacatctccctttatgaaccatggggtctttattaattaaacaatcaacagggctgatttattctcttatcagctgaattaccaagcacacaaatcacagaggaaatgtttttaatactagaatgttctccaagccagtaaatctgggattatctcatcataccgattatgtcaaagctctttagccacagtgctcactaggacataaaattgaatggtatacacacaaatggcccccttccagcatcataggaagaattccaaatttttcttacaataatcagaaatccctaattatcaataaaactagctatgattatttattgaatgtctcctctctgccaggcacttcacatgcattacctgagtttcagaagcactgtgtcccattggttctggacgttttaaacaaagacccaggtctgaaatgtgtgcttgaagcacagaacacgtctctctgttgctttagttttatttcttctagtgagtagctgttgtaattgcatatttgatgcttaggtgtgtgcgtgtgtgtttttaggcatatacaaaaaatcatattgtgaatataagattaatcaagttataaggttaatcaaattttatattacttttgtatttggagtaagatcagatgtgatttgttgattaaaaagtgcttaatgaaggttactggcaaagatgaccatctggtagaactttctgatattcaccgttcagagtctataactacgtttttttcttagacattttccttttgattattttaaattagcaatttaatggaatgttcatatatggacagttgtaatatgtcaagcatgagaatactatttataaaaagtcacatagcaaagcatactacctgaacttaccctcaggtaattgctcctgtttttcttccttcccatctcctccaattatggaacttcaaaggagagggaggaatttaaatgatttaaattatggtttcttctttggactaatatgtgctgataaacattaaagtattaaaatatataccaatattttaaaataagcaaagctgtctcatcaagcttttccattttagttttagacatgtactttgtacagggtgatgtgtcctcatttcaccttgcagtggcattccagccctctcatgttacactcattagtatttctttaaaaccactttcaagttaggcagctctccagctttataaaggccttgaaatgaagttaacctgtgccgaatcaaatactttagtaaatttagcctccataataagaaattccattaaaccattttaaagagatattagtaatgtggattatcgtcaagagaataatgattctttgtacactaaaccacactctgagcttttgaagctgtgaagatgcctgggccttgtcactttcaccttgattcttaaagaacttgaaccctttttatgccataataaaaccgctagtaatcttcttccatgaaaagatacatttttaatatttaaacagaggagctgaacaatttgtgtagggggaacatgaacaaaatgtatactataggattgaaaacaaaccaaactaataataacagtggaacttaccatttgtactacctaacattttcagtattgtaatcagtagccaataaagtgaatgcatttttgtgatagttcccaaattgtgttctatggaacactggccctgtgtttgttaacggagatatgttactttgagtaatattacatagtcttggagactcatagagcacattagcatattaaaatctctgggaaatcttatagtaaagaaacctattcaattatgtcaaacttatttgactgtagaattatattcttcacataacattgattaattgattgatgattgattgagacagggtcttgttctgtcacccaggctggaatgtagtggatcatacctcactgcagcctcaaacttctgagttcaagcagtcctcccatattagcctcccaagtcagtaactgggattacaggcatgagccactgtgccaggctattcttcacataacatttatttaaaactctcgggaacatactttggaaaatgttactttataatgtaggaggcactttcagatccacaatcttaagtaatcgttgtaagtactggccttcagatgcacttgatctaagacatgatgctgcttctgaggttgagtttggggaggacgaaggctagggaaactgatctagggtggataaaggcagtggggtaaaccagggctagaaagagtgtccaaggagaagaaacaaatccttgtcctaattcgtgcactccagagttgggaagatggtggtggatttaggagattcatccagccaaaggctgggagtaggacactaagtgtaagaaataccatccaccaggttaagagcatgatttcgtgatgtgtcaccatttcctagacatacccaatatcttttgtacttcctttctcatctctgcttgtgttatttccctgaaacacttttcaggatgctggtcatttgttctgagatcatgttaggccccacaaattcagagataagaaatatagttcctgccattaaggagctttatatgaaataggaaggcctaaaaataaacaagcatttataatttgatttaataagagataagaccatgggcacagattggaggattcttaagggatatttggttttttagaattaataagagttaacttctcatgggaaaggattatgggaaagaagaagatattgttggtggggtgcagtggcacacgcctgtaatcccaacactttgggaggccaaggtgggtggatcacttaagcccaagagttccagaccagcctggccaacatggtgaaaccctatctctactaataatacaaaaattagccagatgtggtggtgcgcacctttagccctagctacttgggaggctgaggcacgagaattccttgaaccccaggggacagaggttacagtgatctgagattgtgcagctgcactgcagcctaggtgacagagcaggactctgtctcaaatacataaataaataaataaataaataaaaattttaaaaagcaggtattgttgaggcagctaaaaaaacaaagtatttcattgaatgtttagcaagtgagtaacagcgtatgatttgtcatttagaaagttctttggctgcagtagagaatgaattagaaaagaactagagcagaggcagggaggcaaaccatttcagtgacccagactatttcattgaaaaaggagagcaagaaacagattccagagatgttacagcaaggcagtcattggacttgctgacttactgaatgtcagatactgaaacgaaaggagttagagatgctgcattcacctgcattcctttttaaccaaagaagaaagaaagaaatggttttcattgaagcttaaaatgtgtctaagacttattaaagctattggatctagttctaactgcttcctatcacagggactttactagggtagaagcaatgtcaccaggatcagtacttgcatggatgagtagaaggacagtctttcagattctaattgcattcttgttcttctcaagtcatgtaacacagactacatcctggatccatcccgtgatgagtgtcctgaatctatctcgctcagaggagaatgaagaggattgctctagagaactccccaaccagaaaagttgatggttttccttaggaagtggagctacatggatgatgtgagcagagacgcataacatccaattctgagatgaaacagtctaaaataggagtaaagcatgcactacttgttgaagtgtgaaatggagactctggactttgggtatttttgtaaaacttttgatatttctgtatacatttaaaaaatcaattgccactacagtagttccttaagaataatctagttatattttttgaaatcacatataattagactttataatatatatactttttcatatataattagatctttctttgtaatttcatatgtagttcttcatagggtctcagatacaatggtttttataattgacatattgaaaaagtatatgaacataatgaaacacctcatttatttgataattcactaatgttttatattcatatattaggaaagtgaacttagcaagctttttggaatttaaggatcacatttagacatctcatgggctgatgaatacagctggtatctttgtggagctttctaatttacaaaatgctttgtagaccccattgtctttaaaccatacaacatgcccgtgaagctgatctggtgggtatgtttattcttggttttcagtagggaaatagcagttcagagagaggaagctctctgtcccagcaccgagactcactcctaagtcttctgattccatgagcagtcccccttcccccataccctgctgtctccacggagggaggtcacagcccatcacgcaggacactgtgattgtgttgatgcagctggctccacagctgtgcattccacagagattcagaaggcacctcttcggtcaaacatggcccctctataaccccactattcttctcctataaacccttcccccttctctgcacccaagccttcgccaagtaggcgcactctttgtgatattgtttcagcagacttctttcagcagctcgtgtttttctaaagtgaaaggcatggtttgtcctgcttaggttgcccttcccagagggatggtttgaggggagctgatgagaagagaggtatctgttaaaacattactgctctactcgaaacaagatggaagcctaaagcccaagtcgagcagctcccagcactgctgtgcagacctagaggtccttagaacatagtctaagaaccattcattgtagccattttatagttgagtaaactgagatcttaagtctcctagtctactgaatttcatatggtgtataatacagatttatatggtaaagatatacatatacattgtgctcaactatacattcctgaatccatttaggatttgtgatttatgtcttgagtaataatataaagtcaactccagactgataggtagtcattagccatgagaaatgtttcaggatggctagggaagacttgtgttttgcctgacagccatttgaatgttaggaagcttcggggagacaagttttgagagaagccccagagggagctatttccttgcaccccccagaggtgaatgaggtattctataagttagtgtctataattgtgaaagtacaaacttcttgtttttgtcaaattaatggtatgaaatttctctccccctgcttgaagagttttctaattcgtttctagtgagcaaaacaaagaaggtgcttgagtcactgaaatcaaagtactcaggcacacagcccactgacaagagacacctcatccattaactgctgttttgtaccacttgccgccctgtttctgtcaaatacctagtgaaaaaggcctaaacaattgtaatgatattatttattgggcattttgtgccatacatggtgatgagcagtttgcatatatttatttatgatcttcttaaaaccattccatgaaataggaactgtaattatccccaattctaaaagaaaaaacttagttttagagagttagtaatctttgcctaagggtcacaaagcacctatgtgtagaagctagggttcaaggcagatctgtgattccagaagctgttctctaaaccactatggagaactgcttagattcattgtctatgggtacattttataaaaaggcagattctagttcagtgtcataaggaactttctagtaattagagctgataagaaaagaattccccaggagaaaatggaaacactatcccagcaatctgaattccttacttggggaatgttgctgaggaggttcagtgtgtgaatggactgaaccagttggccactctctcagattccctcttcataaagcttccgtgacttctaaaccatcaggtcggtgccataagagatgctcaaaaaagcatggtcagggcttagcaagaatccttttccagtgcaaatacgaccctcatattatgttttggcgagtagccagtctttctttaacatcaatcaaccgtagcaatgtggtcatcacgaagtcttcattgactcactggcttggattttagggttagaaaatctgaatgttcttatgtccttccgtctcactttactagagtgcccaagttgactcatccttactcactcattccctcaaaatatttattgagcaccaacaatgtcacaagcactgtgctaaacactgtggtgaagtagaacaattgctaatcatttcctgggttccacttactcttgatttaaaaaaaaaaaaacaacaaaagagtttgtgtgtggccaggactaaacagctgcttcttaatttttgaattttaaaactaatctattttatttaaaaaaaatcaagtactttggaagtgaataaagtaagagatagcctgtctcactttccagaggtagcagtcactaatactgtggtgagtgattttactcaaaggaaatcacactattaagcagcttggttttgacatgttatgttgtggtcatcttttcatgtcaatacatagattaatcttttatttcaaatgtctacataaaatatcactacccacataacctataatttgtgtggccagcaatttattgaacactaaaatgttttaagttttcttattgctaacaatgtcacagtgaacatttatatattcattaaatccttttcctcatgtatctttgcactcttgtgctagtatgtctatagtgtgaatacattcataaatttcttgatcaaagctaggtcaaagttacattcattttaattttggtacatatccataaattctccataaaagtaggaccaacttacattaccaccaatagtgtatgtgagccttatttttatgtatgataggactttttttagtccaaatgttcctatagattttctgggttttttttttttttttgtccttggaagaataaccttccttccaccaagtccaagaacctgagatttttaatcattaggttttagatttcctttagcagcagagactgacttgctgtatagagggaagtcaagtagtgactaactcactatatgtcaaacacatcattactcttctcttttcctactttacatgtaatggttgcgaggaccaactttcaaatgagctaacttgggtgagacgttcactaaagtaccaagcacaatacaaatgcatcttcgagttctttgggcctcactttccctatctgaataataaggatagtaatcccttgccttttctcaaaccagttcaactcagcaaacacttcctgagcacctgctacatgccaggcaaaatgtgaaatttgcatgctatgaggctaaatggtactgattctcaaaacaaggagctcatagtctaaaaccatttttctttcttttttttccccctaaacaacctcttaaaggggtaagaagttagggggttgtttattaagaacccctgaagagcaaccctttaccactctcttaaatttgaaaaattccaaaataatattaacacctcttgactagaaaaggaaaaaaaaggaacatgccgtatgaagagcctctccaataataaatgcaaagcagctgtcaaaatatagagtcaagtgatactttcataaagtgtttgcacaattagaaaatgttatcctttttctcgggagaaatgggacatttttattttctctgctaagtgaaatgcaactttttgaagaatcaacacgcttgacatttttacaatgtacataaagaactgaactattattaaaacaacttacacactccattgcttataacttttgagagaatgaaaagaaccttaaacagaatgtgcctgtggagcttcgctttagaaatgaaatacccaaggtgttttaactacaactgtctacatgtaatagtgtgtctgcataatgactttgtaaatattaactgcaattctgtatttgctttcttgatatgacttttaacatttaaacttatactgtttctgtctacttttttcaaaagttcaatttttacttttgggggttggactgttctgagggaaagggcgatcagatcaatagttctgtcccccattccattcccccatcacccaattattctctatatcactctaccctgtttatttctttttttttttttttttttttttgagacggagtctcgctctgtcgcccaggcgggactgcggactgcagcggcgcaatctcggctcactgcaagctccgcttcccgggttcacgccattctcctgcctcagcctcccgagtagctgggactacaggcgcccgccaccgcgcccggctaattttttttgtatttttagtagagacggggtttcaccttgttagccaggatggtctcgatctcctgacctcatgatccacccgcctcggcctcccaaagtgctgggattacaggcgtgagccaccgcgcccggcctatttcttttacattatttatcagtttgccctaaccttgttttgtttgttatcttcctcaatagtgggagtaataatgggagtcagcttcgtgagggcagggattttgtcttcttgtattcatttactcacttacacacttaccgagagctactagaggccagacacttcactgagtagtagggatacaatgtgagatatatgtgtttctagcccttgtgtaattcgtattctatgcaaaggatatacgattgaaattaaccaaaactttttccatttattttctttctccgcattctttatcagatatttgaactactggaccatttaatgttcattacgttaacaaagagtgtgatatcagaaagcagaaaaaagcatgttcttttgcatttcaaaaatttagctccttggggaactagaaaggatttatgatttaggtcaaagatttgagagcacatatgatgaggaagatgaggctttcttactcactgtctaggaaataattctcctggctgtgagaaggagaaaaaagaacaaaaatgttggtagggcacagagaaggacctgggcttaaccttctggaccaagttccagggagcagcaaaacctcaattacatttgtcccctagaatggaaatgattatgtggtatgtttaggcagtgggaccttggacaacgccagtgagcttcctccagcccaatgtggtcaacattggaggattagattgatttctgtgaacccaaaaggatcacaggagtagcaataacacctgctggacctgaatgaggatcttttccattcaatccacatgttctctcaatggaaatcaattcggacaataacattagaccatcttaacccagagtgccttagcactagataagcctctgctgtggtctggatgtttgtgcccagcccctaatttcatatattgaaacctaacccccaaggtaccagtattaagaggtacggctctgaggaggtgattaggtcatgaggctccatcctggtgaatgggattaggacccttatgaaagaggcttcagggaacctgtttgccccttctgccttgtgaggatgcagcaagaagttgccatctttgaagcagagagcaagccctcaccagaagctaaatctgctggcatcttgatcgtacacttcccagcctccagagctgtgaacaatacatttatattgtttataaattacccagtctgagatattttgttatagcagctcctgaatggactaagacagcccacagagtttagcagtgaccccaaggaaaggaaagaactgcaagttgcctgagattaatgttgctcaggatccatttattccctattcctggtgtttctttgtagagagtgctccattaaagtaacacttttgtcctgtctctgcttcttccttaggcagcgatttacctaattggtgagtttaggattaaaaaaaggaatacatcctagaacatttcttaaatatattcccttttctctgtttcatgcaaacatggcttatttatttttcaagtctttctcatttcttacctggatgctttcaacacaggtgatatagcttcttccttctccaccacacctgtccccatcaatctacccatcacatttctgtcagaattatctttctataacacaaaattgcttctattcctcccttgctagtcttcagtagttccctagcaccttctactatctgagtccctggctttctccctagcctcatgtcttatcaccaacagttgctcagatatactgttttctgtctaggaaacttctcttgccccattcctgcatcagatttcttctcatacatcaagattctgctctcattttacctcttctttgaagagctccttgacacatgctgccttccccatgcccagagctggcactctatggatgccatgcctgcatttttacacacctgcccaaccccacttcccactcaggagtggtagagcaagaacttccacctcaagagagttgctggcctgtttgtccggacactcatttggttactatatttactaatttacttttatctactgagctgggttactgagtcttagaggcttgaaatctggttctaccttctctttctccatgtggtaatgaaaaccggaactctggttaaagctaagtggtctctctcactgtggctgttccactcaacatcagtagctaggtgagtaaatcaggtggaggtgggaaggaaatgggaaaacagaatactggccaggatggtctgttgtttcttatctgttgttggctttggggtattttattctaaaaccctagaggctgagaaggttaactggaaggcttccaactctgaaatcctaccgcagtcccctattgctgcataccttttaataaagtatcaatcacactatatatgtaattaatttggataggaaagtagggcatgtgtcatctctcctagtagactgtgagtcctttattactgactcagagtccatatattattttttatttctcatgcaagacatgacacagtaaaatctaataaaagtttacaaaataaatttaaaatgtaacattaacataaaaaactcttttagctgtttcctgcttctggcagggaaacaaagattgaattaagaaggaaatgaggtgggggtttaagtaagcatgtctgtactaactagttccactaatgtgggaacaatataatggattttgctgaagaaggaagtgtatgctacttaagttgggccataaaactcacagtatgatcgcagtaaaaggattgtaaagcacatactcacacattgttgatttgcccaaggttctgaagaaataccacagaatgattttggtatagaagggtagataaagcctgaaaccaaaatacaaggttagtgcatttcagagcagcagcaaacttctgttcttatgggttaattaatcatgttactgaagaattgatttggcacaagggagctatgtattgccacagaactctgaaattgcagaaattatctcatctataagtaaccccactggaattgcttgactgttctgtttcacagtggagaaattcatctttcatcagcacacacgagaagagacaacaggaagacaaaacaaattgagtagataataaagttaccttataggaataggtaatatagacaggtaaggtcagaaatttctgtggaatggaatatgaaaagatgtttatgagcagattctatttctttaggcagttttatcattcagagaagtaatctatgcatttaatctaatgccagcttttatttttctttggtgattaccacacaaaaataagaagttggcaccaaattaaatgcatggattacttctctgataaaagtactcgatataagggaaatttgaaggaaatagaatgcatacatacacacacatacacttagtatatgtgtgtgtgtgtgtgtgtatatatatatatctgtgtgtatatacacaccacacacacacacacacacacgtattggaggaataagaaatatttaataaaatctacacaatttcaaaaatatgaccaaatactggtggttcctcatttaccagtagaactctctctacaaatggaaagtgagaagtctatgaagttaccttagtttttccaattaagactgttcattgattgtatttcttctgtctctataagtaccatattcccaattagtatttcatcagttataagacccatcattattttgtgtgtaactgaaaatgaaaaaaagatttaaaatatgacttagtagttagaatttttatcttatacgcctttaagtaaatacaagagaactgtttcagcatagatttttaaaaatcatgtgtgtaaaagagaatgaaatattaattatgatatttacaaagctctgtacattcagaattgaactctttctgcatctcttttttgaatcagagttgtcataaaccacaatttttcacggtaacaccctctctgccatcaggataaataacatttcttaaaggaatattctactgcagtctctgagatttttttccctgtcttagacatccattctacaactctgatgctggcacattttttatcttggcaaaaggacttaatagaaaaattttagataacaatcaggattcatactcttctcaatagtccttaaatggtttattgaccaaaaagtaaagaagtaacagtccagtcatatcatggaaagaacaaccaaattcatgcatgcacaggcaaagacaaccatatcactatgaccacctggctgacagtaactgcaggacatcaattattgtaagacacttcctgtaatatgtttaattcctctgacataaggatttatgtgaattaggaagtggcccaagggtgaaaagtaatagggaaatagagaaatagaaccgatccaaaggaaagggggaaaaaaacccacaaaaagtgtgatgtcaagcaaagcctattctggagatgactttggttcactcccacgggagagccctagagacaaaaaggttctacagtaggttcaagtcagaggccagagaacccagagtatttatacctctgcaccatcagttattgaatgggggtgggggtgggggtgggtgtaaatttccaggtgcttccagcctgcaatgcagtcaaagcatgttcctgtagcctgaggacagccgtccaacaaagaggtgcaggtgctgaatgttgagagtgaaagcacagggagctgtcatgcatgagagtggtagagggatctgaaagtgctagcagtgcctattatacatccaaatactaaagacgcttagatgtgaaaaatgtgtgtcttagaatcgataaaatatggtatagagaatcaagtctccttgttcctggtttatctcatagcatacttaaaattcagctaaagatgaaatgccttaacaagtgaaatgggctttctgaaaaattatttcaatcaaaattgtgttaaaagctatttctaaaaaccctaacatgaaatacttagaagagatcaagtggtttgtccctggacattcaagcaattgaatgtctaaacaatccaagacagataattttgtagtatttactgtgtgaagtgaacctttaaggctgtggacaatgcaaactccctcatgtaccttgctccttgccaatttcaaacaaaccttctcacctatgatataaggcttccttagaattattgattaattatttaagatacaataaaaccaaagtatttttaaaacacagtaattatgttagtgcaggtacatgacatagatatcctcaaatattcttaggacatctataaatcaccacaaacattctggaaagcagtcttggaacatctatcaaaggccttaaaaatttcttcttctgtgaatttatcctcacaaatgaccccaagtttagaccaaaataaaaaaatgcttaaaaggcttattaaagcatgatttaaaatagaaatgattgcctaaattcctgaaaacaggggaatgtctaaataaaatatggtatctaacatgatagaaaatgtttactaatgtttaatgataccaagaaagtatcacaataataacatcaagtggtaataacaggaaacagatctgtatacaatataaaaccaacagtattgtatatataaacaccatagaagatctgaaaaaaaattagatgacattatttgtgatatctattttatttattatatttttctgcatactactctacagtgagcctgtcctttataagaaaaaatgctaatgatttattgtgtatgaaaaaagtgtatctgatttgattatatatttttatttccacttatattttctaggattattttgctttagaattctatgtataatcctgtgaaaatttgtagtgttgtagggactggaaagatcagagattatgttatggccatgaatgaggcctgacctgcattgtcaataactaaattgattattgtggaaacaacaaaaaaattcattttttgaaatgaaaatctttattgaaataactattttaccattgtgtggtcagattcactgcatttgatgctttttcaggatttgtttttcctgctagaaatgctagagttgtcacagatgtgatatttatgttttcattgtctggggagggccaagtttcatgacagagaaagactggggccaattctgtgattatggatgtcaacttatctcagagcagtatcattggttgagcagtcctgcaggacatctaagtttaccgtctttatcttgccattgtcaaagatcctggacctatttttttctgccttgaaaacttttgtgcagtaaaaccagcaatggattttagcagagttgatgcatcattaggattttcacattaactctttggacttagagccatgtctaaagtgtccttcttttggatatagtgcctggtgcagaactctaccacaaaacatcaggtgtgcctctgaatagtctttgcaagaagcacaaaatcctagaattgaggtgaatttgtaagttcctctagtccaaccacctttcaaatgaaagaatccttccaaagcacccctggccaatagctcatcaagattttgcttagatattcttattgagggggaacttactaactcctttaattcttattttgcttaaggctgagtttttaaaacatctaacatcagccaagattattgatttatctataaggaataatctgtgaattaaccttctgtagcttttccttgctgaccagggaatacctccccattgaagcctaggccagattccagtccgttttgaccataccccatcatggtattttagagtacacctgaataagatacatggtgccatgtacatggaaactgactgctctcatgttacgggttgaactgtgtccccccaaaatttgtatgttgaagtcctaaaattggcactgttgccataagccagggaactacctaggagatgctaggagagaggcctagaatggaaccctccctcccccgcccctggggccttcagagggagcggtgcccagctgacaccttgaccttggacttctagcctccaaactgtgagacaatacatttctgttgcttaagccactcagttagtgtgctttattttggcagtcttagcaaactaatacatcccccaatccagaactgtcctcctttggataataaaaacagcaataattatagtgtcattaccctgagtgactggtcccactgttggtcattctttgtagatgtgagttattgccctattgagatcagaagtcctctcacttagaggcatatctaagacttttttcttgtggagggagctcactcaactgtaggtaaggtttgactcatctgggttagtagtaagaacaaacttccaagtggcaccatcttaaaggtgcaagcccatgtgggcgatgaccaggtctggtatattaagaggctcttggtagcacattagaaacacctggagagattttaaaatttacaaagcctagccaaaccccagacccattaaccctgactctctgagaataggaccctggcacctgtgttttaaggattctaggtgatttcaatgtgtagccaaggttcactgccatagcctgtcctggaatgcaggtaactaaaacttcagcagattatgaaaaacaaaagttactttcttggatgcatatattcttatagcctcaaaactgaaactgcaaactgaacaatgctgcagtcagatacacacacatatttcaactgcataacttcctttaataatacttttatttttccaaatttgaagactgtccctaagtcatttcttctaaaagttagtaataatcccaccaactcacatttacatagaagttacagtttaaagtttgcatctcgtaataacttggtgagatagggcaagcattatttctaatttgcatatgagaaaaaactaaggctcggatgagttatgtgacttccctgagtcatgttagagtaactaactcctgatttgtaaactgaaggtcccaaatcctgggaactccctcagctctgggcaagccaggacaggtaggtcaccctgcacctacacaaggactgagctgagttctagttacctgctgtgaaggactgtagaggttatctaagccagctcctccttttactggaaaaggaaaagactgagataagtttccaaaacccctgctggagcaccttctacttctagaaagatgttgaggggcttccagggcacaaaggaaagagaagtaactgtgtctccttccccaaccatgtatgtgatacattcattctctaggattggaaattcccagaaagctgtgtcagcaatgagatttgtttcattgttttgccttgttttgtcattgagttgttatagttaaagtttattattttttaatgcagaaaaaagtgacttttgggggagtgcagagttctatgaatttttaacacatgtctagttatttgaccacaaccgtaatcaagatacagaacagttttatcatttcaagtgctctcctgctatgcttttataacacacccttccccaccccaactcctggcaattactgctctattctccgtaactgtagttttgccttttcgagaatatcatataaataatcatgtattatgtaacattctgagacaggcttctttcacccagcataatgcctttgagattcatccagatcgttgtgtgtatcagtagtttgtttttattactgggttatagttcattgtatggatataccacagtttctttagccattcacccactgaaagtcatttgggttgtttctaggctttggtgattatgaataaagctgctatcaacatccacgtattggtttttgtgtgaacataagtattcatttctctagatgaaatacccacaagtaggatttcttgattttgtgatatatatgttttctattgttgccctttaaaattacatgaatttagtgacttaagcattacaaatttattatcttacagttttgtaggtcagaaaggtcttaatgggctaaattcaaattatcagcagggttgtatttctttctggtggccgtcagagagaatccatttaggttcagttccttgaggtcatagaacttgccttttgaccccctttatccacctgcaaagccagcaatggccagtcaagtccagtcccttcatgtacatctctttctaacccttctctcatcctctctgaactttcttccattgtcatatctctctctctgacccaaccatgaaaggttatctgcttctaagaattcttgcttagattgggttcaccatgataaaattcaggataatttcaccatttcaaagttcatctcttaatcacatctgcaaaatcccttttgcttttcaaggtaacatcttcatgtgatctggaaattagggtatgagcatttgtaggggagaatgttattctgcctgcttatcttttcaagaaacttccaagctgttttctagaatggctgtagcatttaatattcccatcggctgtgtatgagagttccagttgctccatgcccttgtcaacacttggtactgtcagtattttttattttaacctttctcatgggtatgtagtggtatttcatcatggtttaaatttgcattcttctcatggctaaagatgttgaacaacatttcatctgcttatttgtcatctgtttatcctctttgatgaaatttctgttcaaatattttgcccatttttttaaactgggttgttttcttgctgctgggttttaagagttctttattctggatacaagtcctttgtcagatatgtgattttcaaatattttcttgtctaaattcaacttttccatatttcacctatataccagtttacacacatacaacttccctgcacctcaggttctgtttaggttggcctagaccacagagtgatctgatttgggtttctaagccagggttttcagatctaagaatggctctgccttctccaagttatagtagatcccagatatctacctatcacaattcactccattcctatattcctcttagataatgcaacttttaatctattaaaaaatgtcatttataagatcacaggattttaaagggaaacagctactcgggaggctgaggcaggagaacggcgtgaacctgggaggcggagcttgcagtgagccaagatagcgccactgcacttcagcctgcgacagagcgagactccatctcaaaaaaaaaacaaacaaaacatggcatctgcaactcctttcacactaatgaccctacattccaacaaacattttttgagtgtggatgtggccttcataagagaaccattaggggagtcaaatgacaggaagtcaaaatgaactgggaggaaatttgagaacactgcagagtagttcctaagcatggggagagacctctataccactgaattatatagatgtatagataccaaatctgcttggaacagtgtgatttttgaaatctaaagacacctgctgatgctcatagcagaaatgctgaaaattaagcagagagtggaaattttattgcaagccttctggaaatttttgtctatgtctgtataataaggcagcaatctggagctgtcttgagaattaacttcaagaatctaaagttgacagaaaccagcccaggctatttgaaaatcattctcttactgcaccaagcagaggagtttatcagtcagaaaccctgcaggaaataggatccatcacagatggtccaaatgaaggcgctgctcatagatatgtggtgaggggtcaaagaacaagcaagtgatggtgaagcacccaaaaactagcaggaggctggaagctatctctctgcttttagagtcgggggacaaaggggaacataatgtcactggaaaccactgaaaatgagaccgtggaggatcaggcaccctgccagagctgtagttgcagagggatgcagctagtattggaatatagtgtcaaagcaagaaggatagaaagagatgaggccatcccaatctcactccctcctttgtctctcccatcctcccttctgctttagagcttcccattgctagaaggaagccaacccaaaagcattcagcaggagagcccaggggagacaatctataggtctctacttcctcctgaggcacagacaagatcacagatggaactgagaggcaggtggggaataattggcacaggagtaatccagtgattcctgacgcatgtgcaagaggaggtctgctatctgagaaagatgagtatgggtgagtaaacaaaccattcattttttgatgggtaattatcgcccaccttctaggggcacagatgctgcccatggatgagatacacagttcttattctcacagagcttacagccagtcaagtgaagcagagaagaaggcaaactcagcacaggggaggaagtaagtgtgacagacgcacatagtggaagcatgtaactcaggaaagagtggtctgcgagggctttttggaggaagttatgcctcaacagaaatgtaaatgattcgtagatattgacgaggcatgtggagaagaggaaaggtgagagagcctcctgagtaatgtcagggtgatgagacagagtgatgctgtggggttcagtgtaaccatgtaaacagagcacatcttcaggtgggcaaccaggtggggacagtaggaataacctgaaataactctggagaagtaagcagggctcagatgccaaaaggcctcataagctatgttaaaaaatctggacattcccctaagagtaagggtgaggcacaaaagatcttaagtacggtgtgatcattaattttatgtgtcagttttactgtgttgagggatacccagatagctagtaaaacattatttctaggtgtgtctgtgagggtgtttctgaaaaagattagcatttgaatcagtagacccaatgaagatctgccctcagcaatgtgggtgaatatcatccaatccactgagggcttgaacagagcaaaggcagaggaagggagaatcctctctccctcttcttgagatgggacatcattcttcttccctcagacataatatttcctggttttggggccttgagactcagattgggccttccaccagccccaccctcaccctatccccacctccccacttagttctcaggcctcagaagagagtctcatcattggcccccaccagttctcaggacatcagactgggaccaaattacacccctgctttcctggttctccagcttacagaggcatctcctggaacttcttagcctctgtcatcacacaaaccaattcccataataaattccctcttatctctgtacctataatgatacatatgaagatactggttctgtttctctggagaaccctgactgaaacacagggcaatggcataataagatttgtttttaaaaactcccaggtgtagaggacagctgggcaaggaacaagagtggaggaaattttcagactggtcccttctctggctgtaacaccctggccaagtgtctcaacctccctaagcctagcgccctcacctgttcaacagcaataatcaggcctgtcttgcctacctcactagattattgcaagcagtgaagggacgtgaacaggctctggcaaccagaaagcacagtcataattccaaataacatgatgaaaagaaaatgtggctgatattgttaatttcccaaggaaatctgtgtagtcctctgactcattttgcaaagactggagaggaaatggagaaggaagcacaccagagccaacactttgaaaggaggttgttcattccatcactttcgaaatggagattctgtcctcctggctgtgtggcacatgattgctgtccaataaacaggaattgatgaatggctgagtgaggctttgttttgttttcatttttcaaactcttatgactgcagaggggaaaactaaatcaatgccatatgcctgtaaaaatccctctgacatcttttattgtaatggaagatgacaatggttatcagagcagaaggaacatgcctgagtgaaagtaaataccaaacaccttttgggaaacaaagcacctcctggtgacctttgcagctgttccactccctaaattatggcaacctggagttgtctaatgacagtctaaccaggatttcctcttgttttcaaatgtgtgcgtcctccctctccctgggttgtgcagaattttaaatgtcacagtaatcacatttttcccgaggataacatgaaatatcattggagcttaatggagatgaacaaatgatcaaattcagatgttggtgatatatcatgttagaggaatgagatctattccacaagctgcaaagcctctaaattttgttaacacaaataagaaataaagtagcaaaagctactatttctgagtccctaccatgcaccccaccctgttccaagtactttacacctatcatctcatttaatcctgacggttcttcagcgtgggcattattgtccccatttaacacataaattcagataaattcattgaactatttaaagccacatggcatgtggttttgtgaatgtcccccattcaagctatatggccttaataaagttacttacctgctgtcagcctcatctgcagaatgcaaatatcaaagacctctcactcataagattgtgaaggattacattaaataagttatgtgtagcacttaagtacagtgcctgctatactgcaatcacttactgtattagtcagaattctccagagaaccaataggagatatatagatttgttttatacatataaggagatttattgtaaggaattggttcacatgattaaagaggctgtgaattcccatgacctgctatctgcaagctacagtagactccaaagagctagtggtatagtgtcagtatgagtctgaaggcctaagaaccaggacagctgaggtccagttcaagtgcaggagaagatcaatgttccagctcaaaaacagagagaaagaaatctttcttactcagcttttattcatccagaccttcaatggaggaagaggcctaacccatactggggaggaaaatctgttttactcattctatccattcaaatattaatctcacccagaaataccctcacagacacacccagaaatgtttaataggatatctgggcactctgtgccccagtcaagttgacatataaaatcacactaaatagtgccttattagcaatattattgtgattgttattattgtagatctggtattttacatctgtctagccctttccacattgcccgaaaccaaaaccaatcatcagtataatcataatgaaatcaaagctacatataatttttttcttcccttaggaaatttttcaacatcttgcacatttaattcatggcaagagttactaccactgggactatttaatactcttggggaaaagtggaaatatatgatagcaattcagaaataaaggaatgtctcatattgattcctagagcatggaaaaaaaaataaaggagggggcctaattaacagcttcttgccaacccttcagactagacctgtgagtataggtaaccaagcaaagaagagcttagaccatgaactaaaagaaagcacatccttgggctgcaggcatctcattagactctcctatataaaactgaacaaaaatgagttcaaatctgaaggcaaaaagctatatacagttgatccttgaacaacatgaatttgaactgcatgggtccacatatacatggattttctcctacttctgctacccatgagatagcaagaccaacccctccttttcctcctcttcctcttcctctccctattcaatatgaagatgatgaagatgaagatctttattatgatccacttccacttaatgagtagtaaatgtattttatcttatgattttcttaatgttttcttttctctagcttattttgttgtaagaatatagtataaactatatgttacatacaaaatatgtgttaatcaactttatgttatcagtgtgttattatcagactcaaaagttatatgtggatttctgactgcagcagtgtggcgagattggcacccctaacactagcatcattcaagggtcaactgtatatatctataccacaaaatattccatggaattttccttgactcaaaccgatatctcatttactaaggtgcccactttctacccaccacctccatgtctggtggtggagtgagaaagagctgagcttgacatgaagccctgccacatactagctttgttaccttgagctaaatactcatctctgagctgcaggtgcctcctccattgggcacaaaaccaactcaacagagtcattatgaaggttaaggaggtgcctggctctatgtctggcacatgataagaccgtcgtaaatgtgagctttcttccactctcttcctctcacctccataaggaaaaagtagtaatattttcttaaatagctactgtttggggacaactgaaagatgccatttgttcttctttgcataaggagaaacctagaactaaaagaactataggaactttcaagtccactggtcatcaaacgatactctgtgaagccttgttggggagtttgaggttgggtgagatttctgtccctgttcacccctacacttcaacctgagttctttttacttgctttatgtatgtatttaagaccttgctttaacaaaggaatccccagaaaataattgcaaaccaccagtctaaagaattacaatttagagatgaggaaatggagactttacaggtaaggcaaccaactctacaatcatttgaaacagaatcagaattgaaaggctggtttctgaactctgagaccaccatgctttctgtcattaagctgtaacacctcactattaccagtgtgggaacaataatgtgatatgacagaaagcctccctcatcacagagaaacttaggtttggctcaggtttactgaggggagtttcccatgaagagacttaagacaagaggaaagaccattttaggcatatctcagaggtcaaggtggatagcacctgctctgtatggcctatagaagtcaaaattccttttagattcctattccaagacttcatcctacatcatgtcaactgacacaaaacaatccattttttactttctgctacaagagctgagtatacttcaattcactaacatttgggggaatggaggtggagacagatgcaggttcactttgctaaactcataacattactctatcacactagcaacctatgcttcttaacctttcacctttgtttcttctcagctccttcatctgattgtcacataagactctaaattcttctgctactttgcagacttatctagtttttctaccattcttgaatattcagaactaccaaggtgcttagcaatttgaaaaagtcctcatgctatcaataatcagccttcttagaatgtagttgtaattataggtacaaattttttaaataaatcttaaattaaattgtattctattataggaaaaacagagtcacctatgatacaatgagaggataaagcagtaatgctgaatttttcctactcaaatttcaccttccctttggagtgctgtcacaattcttttgctgatatctcattcaggccctggaaaatgttattttcaccttaaaattcacagcccaagcctgaactgcatccctctccttggttcccataagaagcacagagaaagggaaatttaatttttaagataattaaatagcatctgaaatggtggactaagtagttcaaaccaacactcccactgaagacaattagaaaatccggacttaaaaataatcgctaaagtcattggaaagctgaaaaggcaatgagaaatgctaagactgatatctgaaagaagatggaaaccaatagagataagttaaacatttgagcctatttacccttagggtatctgctgattctagaaggggtgagtaagggtatgagttactgaacagaaattttaacagattcattagcgttaaagagacaaaagtaggaggagtccagagcccaccaaaggggtactgataaatctttggaactttaaaggctcaacatcctatgagtaagggtaaagtggaagattaacccttgcagaaactgaagacaagattaaaatcatttcagtccctgaaactggatcaatataactcaaagattctagtgcccctacttatcttccataaataaacacaaattatctttttcttttttcttaattttcatactaccatatccagcaggtggtaaaaagaaaccaagcacatgagaagacaaggcaagaatcaagagaaaacagcaaaaagagagttctagataatggaattattagtcacaaactttagcaattcttataaaggagataaaagacgaaattcgagattttggcagataattggaaaccacagaaaaggggatactttagagctaaaagatataaccaaaattaagaactccatgatgtgtttaacagcagttaggcacaacttaaaacagggaaatggaagaaaacatccagaattatgcaagaaggaacaaaagaataaaaatacagaagagactaaagggcatatgaagtacagtgagaatatgaagtacaatgagaagggataacgtataatttgagtctcagaatatacagagggaaataatgggttagaaaaaatatttgaatatacattgactgaattcttaccaaaactgatgtaatatattaagccataaattcaagagtgcttacaaaccccaagtaggataaatacaaagaaagccacatctagacacatcatagtaaaacttctaataaacaaagacaaaaagaaaatattgaaagcagacagaaaaaaaaagaccacttaccatgtcaacagaaataataagagacaaaaaacaatagaattactcctacaaagtgctaaggaaaacaacaacaacaacaaaaaacattgccaacttagaattctatgtctggcaataatggcttttaagaacaaagataaaatgaaaacttttttagacaacaaaagtcaagagaattgaagagacccatgttaaaggaagtttttaagaaacaagttactccaaatgaagcttaaagatgaaagaaagaataaaaatcaaataaaagaataaatatgtgattagagttcaatgaatattgactgtaaaaagcaataatgattacatctcatagagttttaaatatctctaaacctattgataggcagcaacaatagcatataagtcaaaaggagggtagacttcaaatattctaatgtccttgcactttacataaagagggtaaaaactaccaagcagcattagcctttaatgggtaatggatgaatgttgtaatctctcaatcaaccaccataaagttagtaaaagtaaaaaaatggaaaattcaactaacataaaataagacaagaggctaggcacagtggctcatgcctgtaaacccagcactttaggaggctgaggtgggaggattgcttgagcccaggagttcaagaccagcccgggcaagacagcaagacccagtctctataaaaaataaataataaataagaagacaagaaacaagaaatatgtacatacattggttggcataagtagaaagctcatgttaaaatgacagattcaagccaaatatatcagcaattgattaaatgtaactggactaaatgcctcaattgtaggcaaagattgtcagactttataattcaacaaaggtcaactataactgtgactcttgttcacaagagtcatttcaacatggagatattgtaaaaggatataaaaagcaaatgaattttaagagatatacagtgcaaagaaaaactgaaagaaaggtagtatcactaaattaacagagaaaagtatacttgaaggccaaaattgtcacaaatgaataaaagagaaacttcataataaaaaatggtttaatttgccaggtagctgtggcaattatacatttatgtgaaccaaataatatacaagcttatgttattatttcaatatctcactaagagtttttcatcataccttgcagtataagcagacaaaaataatcagaaaaagttatggacaatctgaacaacacatttataaatgtgacttaattgttatcctacttaacaactgtaaaatacactttttttttcaaatacacatgaagtagttataaaacttgaccatattctgggtcataacacaattctcaaccaatgtcaaagaactgaaatcacctcatctgacaaatgatgattttatttcttcctttataattgtataacttttattactttttctagccttattaagttgcttagtgaattattgaaaagaggttgtagagggcaagtttgttacattcccaatctcaaagagaaaatgtgacatattatttataaccagaagagaaatttaatttttactattttttaaaaagttattatcataatgtataacacatgcacaagtgtaccaaatataaatatgccattcagtgaatcatcacaaagaaaacacttgtataagcatcacacaggagaaatagaactttctagcacccttgaagtccccttgagctcttccttttctccaaggtaaccagtatcctaacttctgaaagtatgtattcctttcgtgtgcttttaaactttatgtagatggaatcatacatatgtattcttttacctggctttaaaaaactcattgcaacatcagaaaaatataagctgaggagtattctttaaagtaatctctagtcttcaagtgtgttaacatcataaacgtcaggggaaaactgaggaattattccagagcaaaggaagctaaagagacctaactaataaatgttttcttggattagctcctggacctatgcagatattattggaacaataggcaaaaattgaagggggtctgtggattagatggtattattgtactaatgttaatttctagattttggtgatactttggttgtatgaaagattgtttgtttgtttgttgagatggggtctcgctctgtcacccaggctgagtgccgtggtaccatcacagctcactgcagccttgacctcctgggcccgagccatcctgccacctcagcctcctgagtagctgggatacaggcgcatgccaccaggccaggataatttttgtattttttgtagagatgaggtcttgcttcattgctgaggctggtctagaactcctgggctcaaataatctgcccatctcggcctcccaaggtgctggaattacaggcatgaaccaccacctggccactattttcttcttcttctttttcttcttcttcttcttcttcttcttcttcttcttcttcttcttcttcttcttcttcttctccttctccttctccttctccttctccttctccttctccttctccttctccttctccttctccttctccttctccttctcctcctcctcctcctcctccttctcctcctccttctccttcttcttcttcttctcatactgaagtattacaaagccatggggcattatgtgtgcaacttgctctcaagtggggtgtgtgtacgtgtgtgtgtgtgcacatagagaggaaaagagaatagaaattataaggtacatgaagtaaaatgttaataaggaatctctgtggagaatatatgaggtctttatattatttcaaaatgaaaatgaaaataaagcattataacatgagcaacttccaatggtattaaaaattcacctgccttcaaggtgttcatagtcaaagaccggagtggagagagcagatgagtactgggcagtgacatctgaggacaactactctgatagggcaaagcacttactgtgtgtgccaggaccacagaggagacagactcaacgcatccactcagggcatggaggcttcctcacagaattaatggttgacccaagccttacaggaggtcataatctggagaaagacgaaaagggtgaactgagcagaggaacgtcatgtttaaaggcacggagaaaggagagaatctggtgagtttgggaagctgtaaatggctgtccatggctgggacccaggatccatgtgtggaggcaccagagcatgaagcagcctggactttatcctgaagatgatggtgcataacagggtgttagatctagagtggacataacaattactacgccaaccccttccatatatcctctgtgaaacagagcttttaccaccactatgcaattacttgtctacaaaccctccacgtgattgctgacactgaaccatacattaatttatgaccacaaatataaatgaaaaaattagcttgggataaatgcaattttttttgagacaggatctcgctctctcacccatcctgcagtgcataaatgcatttaaatagtgaatgccataaaaagaaattttcaggaggaaaacaatgcatggaaagaaaagctctagctatatttcaagttaacaaatacggaaaaagcgatcttaagaattaatagcctcattatatattaatacttctaaaactaagcaaatttgaaaaaacttggttggctttgtttagtaaatcaaagtatgtagtgttgtaaaagaataggcatttaaagaaaatatatctttactaaaatccaaatggggaaaatatgcaatgcaccaaattctaaaggatgtatgatggttcaatcaaaggaacatggaagttacaaggcagctgagttgaagatcaaaaatgaattcttggcttagagaagaggtaataaaatgacaaaatcattttatctgtgatgtggtgcatggtctttggagacagacaaatgtggagaggaatacacaaggtctctgtgatcttttgccagttgattatccagttgtcatgaaggctaaatgacaaatagatatactatcattagtccccaataaatatcactccctttctcattttctccattcattcctctttcctccatttcacagctatatccttattttcacacatgaccaacaaaagagacagcaagcaaaacaaagatcctccaaaattaccttaaaagacccaaaataaaaagagctcactcttcaaatcaaaagggacaaagaaaccatgaaaggtattcattcaagtgaggcttagaggctgtggggcgaagaaatacacggatgtccagagctgccttatgcagacagagtattttgcaaatctgttccaggcgtctgctgaggtttctgcctccttcagggaatgtattgccgtcattaatgcacactgactggtatgctttccctccaactggttttgcagagaagtaggcagcatgcaccctcataggcaagatgcaaaaggagagcagagaggcaggatgtccatgtatatgcagaaaccttgcccagaagatgacttattacattaaaggtgatcaagcttgggaaggaaccatgaaaactctattatgctgttaggaatattcacagccaagtatgtgataaactgcacccctcccttgtttcttgccaaacaggctgatgtgctgtgctgcttatgatttaaaaaaaaaaaaacaacaacaacagtgttctatggagcccattcttagaatgccaaagatcatgacaagtcccagatcttctgagccaacccaaacctggctggtctcagagatggatgatatagcatcctggagctggcccagtgttcctctccaaatggattcaggaaatgcactgagcgctgacaaagcttcctcccaaggttgtgaggctgtaatgagaacacatccgaatttccccccagggaggctgccaagaactcagaggagtggggaaggagtgtctggaccacgggatggctgtgagggagataagctccagccctctagagttgtcgatcagggatttagagggacttagagagaatgaaagcactcagagaaataaacctttcataaccatctttagggcaggcagacataagaattaaagagtaacaaagatctttgctctgacagaagagcccagaaagcttaaaccatagcaaccttggtaataagtgtaccagatgctatgccgaactctacatgcattatctcatttaatcttcatgatgtccctgtgattggcactgttatcatatccattttacagatgaggaaactgcaccttagagaggttatgcaactaatctaagaccaacagcagtgagttttgaaaccatcactagatactgcctctccattgaagataatctattgcctaacaaggtgtttagcacactgtaagcattcggtaaataattattaatgaaataaataatcaactaatgttgaatatggcagaataaggtcagcactggattaatgaagacctgcactaactggctgtgtaactcacggtaagttgctggatgtgtctgggtcacattgtcctcatctgaaaagaagaatttagactatatgctccctgggaaatatggcatgatgaataagtcatatggagagccagcatttaaaagaacccatgcatcaagtctaaaccagagtccccattgtaattctgacccatgttccagctatctgaaattgcttctctctccctagaacagtgatacctgggaactggacagacacgcacctctttctctccagagcaccttatggaatagtagcagagggcactgccactaacagaagggccctttattagagctgccattccattctcagtgactgcattctcctctttgtctcactcaaaaagcactgtggccactcctgattttaaaggatcccacaaagaattttcttaccctggttcctggcaattgaagtgcagagatcctttctaccaaagtgattccataatgacagcaaccatctattagaatggtctcagagcaaaactatgttcttaaatgctttccgagtttcctcttctttccgttaaaatttctttttgtcattaaaaggcattaagtaagagcttgggcagaacttgctgaactgcagaattggttgcttttgtatcaattcttactgtacccagacattatccgtatttcattctttttttagtcactgtctgcttccagacctgttcattctcctcatctacccagtctccatcaaagcctgccacctctgggaagacttttctgagtccctcaagcagatgtgggcactttttgtaggaatgaattatacttgaggctagaatccatgatttctcccctttgcgtgctcagtacccagcagaaggcctgatgcaagggggacatagaatatatatttggcaaaaaaaatgctgaaaggatgcttcaaaaaaccaagtaaaacattaatagattaaatgaaaagtaaattatgagaatatatattttttagtaatggttatcaaagagtctacatccagacaataattacactgatgaccacttttcctctttagactttataaaatgtgtgacttgaacaagccctgtgtaagttgaagctaaggacagatagtttatctaagagagagaaagatggattttctgaaaatccaaatgcatttgcatcagagcttactttgagccttaacccagttccaacaaatggatgaaaggatcaacctttccatcaacaagcatctacaagaaacaggctgcccatcactgccctagatctcagagacgaagtgaggccacggtcaagttacgtgccccagatggaaggagacagtttagtctgaaagagtgaaggctgagttatgaagtaattcttgttgaaaataaacctatacaagtaattaaatttggaatatcagtcctctctgacattggccagttctgtggccctattcaaacaagattacgctctgaaaaacagatgctagacgaaaaatatgagaaagtataagagtcatctatgtgctacccaggtggtgtgattcagtgggaagagtgactgtaaattggattaaacctgggttagaatcctagccttgccccacagtacctcttagtcatgccacttaccttctgaacatcattctcctctctagaagagtagagaaaataacacttattatatattgttgaaagtaggcagttcagtaagtgttactttcctttcctctaggcagtaggccactggagaaaagaattgatagggaaactttctaaacggggaaaaaattggctagatttccaagtggggaaattttactgttgggataatttggttttagaaaggaatactgaaggtaggaatcctcaagaattggaatctctagtgaatcactttaattctacaaatacttattgaacaccataatgtgacaggtattgtcctgaacccaaggatacagcaaggaacagaacaatccctgccctcagagagctcacaagctctcaggaaagatattcattaaatgtctgcatgtgtgatgagcattttgaaagggttccagggaagcataggggtgcacaagacctcatgtatactgtcaaggatggccttatctgagaaagattcgttgatgctaataatgaatgaataagtagggatacaatggtcaatttcacattccccaccaccactattcatatgccacagatatgtctgacattcctgctacatgccaagccctgaagagacagagataaaagagaaactataaagtctgtgatctcccaaggcctcaaaccccacagaagaacaaaagtaattgcatagatgccaaataatatcataaataaagggttttgaaaacaaaggaaggaatggtggatctgctcccgagggagataataagcatgccaaggaggagatccagcattgtggtttgggtggcaatttccacgctactccctgagcttttacactgtgtatataagtgagacctgcagtgccagctggtattgttaacaactcaaggcattaatgtaatacagtgatgccctcagaaaaaaaatagagctgataaagaaattaacgtgttcaaaaatacacacttcatctgctgacttgctcacatttccttcacacatggtggggtttactcagagccagagagaatgaccgtagcagtaaagtgaaactcacaagtgatagtcaggggaaaggccaatccccaccctagcctcatttactgagcaactggagagcttccattttcagagccctttccagtcttcaaagtatcttcatattccaattttattggttcttcccaacaaatcctaaaacaaggagtgcagatcttttattcccattatacagatgaggaagctgaaactcagggtagataggttctttctagagtcatgtggctggagagtgctgaagggactattagaacccaagtctgattttcgctttactgatctaataccccaggacagggcttctcaaactacaatgtgcatatgtgccacctgggagccaatatgcagaatctgattcataagtccggggtgggacctgagattctgcatttccagctctgtgacaccagctggagaaaacgcattcttcctgatgaaagataatcatagtctgtgtttcccagatgaaatttcttcaaatggttatgacaatggaggatccttcttattttttcaaaataccaaatagtggtccctcaacaacttcaacctaagcaatacttatttccctgacacttcaggggacatagacgtcttctgttatagttcatctgtctctgttctcatccccatctctcttagtctctttctgcatctacctcagtctctgactctttttctattactctttctcatacttgaccaccaaactatgtccttgaatgtacagtgtcaagttgaggtgttctccgataccaacaatcaattctctgattctccaggcactaactcaagatatccagcaattcaattcaattctcacactgctcagagatagtgcagatcccacagcttaagagctcagtcaaacaaggcttcccccaatttcaggcaccagtcaaaaatcccaggccccctgtatttctgactgattggttacaaattgtacgtttccacaacatctttcttatgcttgataatttgctagaacagttcacccaactcaggaaagtgctttacttactattagcagtttattataaaggatataactcaagaacagctaaatggaagtgacaaatagggctagggattgtgctatataagtttgtgaattatgtaatttaatcataaccaaaaccaaaagaaatacgtgctattgaatccaataaaaaattctgtctgtctgagttctgagtgaattgataaaaagacaaagggactaaatgtatcatctctattattgataaactataggttggaggatagagtgtatattttcagatgaatggcttttccaatactacatcccagaagtaaataaactcacaggtatcctggaaccacagcagacctctcaatggaaaggcaatccactgtaaaatgtatggcatgacagaagtggacttacttcatgtgagcaacgtggtgtcaagaggaagaaagggagggacaattgaatgtgctcaatttgaaagttgttcttcctaaattaacctatcaagttagttacttcaccctaaacacacacacgccaccttcaaagtgtaatgagtaaaatggaggaaagagaccaggactcctacatcaattgagttccttctggatgaaaggaaatacctgaagaggggagaaatcactctttccaagatgtatgattagcccccacattcataatcactatgtgccaggaatttgctaaacactttgtacatggattactcatttagtgctcacagtcagcctctgaagtctctactcttagtatgcccattttactgatgaaaattctcaggcttagagagattaactaactttcaggggatccagccagtatgtagtgaaggctggattcaaacctgaacagacacagacactcaaatctttgtcttatattgctgacccagaggagcctctctgatgaggaaactgacagtctgagaaattaattcacacagccaatagttagtagagccagatttcaaacctgcagcgatctctctgactgcaaataccatgcacttaaccactgcacaagtgcacaaaagatttaataaaaatttgagtgccaacagactcagaaaagagaaacatgactttgggttggagcactcatgaaagctacataaaggactggtgttctgagctgatatttgcagataggtggcatatattttgaggaagactttccagtctgagggactaggatgaattctagattgctgagcaggaagtgagcttagaaaagattgagttcatgaggaagatgaggaaacagagacctgagaggtagagcgagtaaaggagagctgagacaaccacgttagatgaaaggaccacatgcaagggaatcaaattaaaggtgaatacatgaaatgaacctgattatggggatttgaaagcaggcaaaaaagtttgggtggtaggattcttgagcacagtttgagagagaacaacctactacagaacctgacatcaattctcatcatggtttggagaagatctcaccaggatgtatgaaaacaaaggagaagcttggagaagaccgccacccaaaaggaaggtgatgatggcttgagctaggcagtaaaatacaaggagaaaggaaatggtgaattgagaagttatctacagtttggtgagatgaatagtttcagggaggaagaggacaaaaaaaggaaaaacaaaacaaaacaaaacaaaaacccctaccagtttctaaactaaggggcttctaaatatcacttcaaaaatttggagaattagaaatttggttttggaaccctccatcatttacttcctgggcctcctcctctgcttgtctttgccttaaccaagacctgatttcagaaaaaaaaaaaaaaaaaaacgtaattaattcctacagcaaggtgtccatgacaggcaaggactagcatcaccaatctcaggaagaagaagcattaacatttaaaagcaggcattttgtaatcatctcagttagagaaatctaggcatgagcaaccaacagaggaagaatttcagggaaaagaaggctttctgcaattgggaagtgatgccatgtgaagcctcctattgcatggtgcttctgatgctccagacatttcagagcaccttacacatatgcctgcattcaatcctaataacaaccccatgaggcagaaatgataatcctcattctagaggtacagaatggacagaaaaaggtcatacaacttgccctgaatcacatagtcaagaagtgatagagtgaacccaggcaggctggctcttagattagttcctgatctcagactgagaagttggggcaatatgaaaaatattgcatcagcactttaaaacatttttaaaatagtaggcattcttatttgtgtgtgtatgtgttgtgtatatatatataaatatgaatatacatatacacaacacatacactattccggaacaagggaacaaagtagcagtgaggaatctagagctcctcctatttggcctgtcccccatcccgcattgctgcctctaaagcaatggaaccacctatgtggttgcatggaaccggtctaaatatgattacatgcaaagcagctaatactcgcccctcctactgtctgttaatgactagattaagaaaatgttgtgggatctttcaccttctgcctcaactaaatttactttactgatgcagacagacagaaggcacaagcatcaatcataggttccagaaggtcagaggccaagagaacaaaagctaagaggcaaggccatacctgaaccctgtccagtggagaaatgtcaggccttttatattctagttcactttatatatcactggtggagaaaggtagagacaggtagagcagtgtgagttgcatgtttctaggggcaccatttacatagaagatcatttgaacagtactctttgagtggaagagccagggtaatgagctgacacagcccaagtaacaagcaatcaaaatgaaacctagacatcaagtactcatacctgtgcataccacctaaatatcaatacctgtgcataccacctaaatatcaatctggaccaagcaagggagggatggtgatttggttgaaacaaacagtcctattaaagcaatgagtgagaaatgttaacatctaggtcaccttatgggtcaacagtcagcgtgtacattggttaggtgagcacccctgggccaatcagcagagcccagatggcagatagctaccatccaccgggcaaattatgcagaaggaacgcctagatgggactggggagtccagagatcttatgaagttcagtccttccagttcaccttcatccagagctactttaaagcacagttcaaaaccctctacctccatgaagatgtccctgcttaccccaaatgggaacattgtttcccttttatataagccttcgtaacagtttgtatttctttgatgtatttcccctctttagccctgaactgtgccttttaattttttaaattttttatttattttgagacaggtctcactctgttacctagactagagtgcagtggtgtgatcagagctcactgcagcctcaacaactcggactcaagtggttctcccaactcagcttactgagtagcaggaaccacagatgtgtaccacacaccgagctaaattttttatttttatttgtaggaattttgcccaggctggtcttgaactcctgagctccagtgatcctcccatcctggcctttcaaagtgttgggattacaggtgtgagccactgggctttttaaatgcatatctcttcttttctgcattaggctgtaaacttcttgagggcagggggtatgtcttattcatccctgtatcccagtggttctcaaccagcagagatttttggttgtcacagtgtcagcgagagaggaaggaggtgctactggcgtctagtgggtaaagcccacagatgctgctgaacattctatagctcacaggacaacccactctccccaatatcctgtatgtccaaaatgccaacagtgtccagcttcagaaatcctgccatatccctactgcttggcacatagtaggtgtttgataaatgtttgttcagtgactaagtggatgaaggaatggtttgtattttcttaagtagtttacctcttctctgaaccccctcaatatgggttggctcagcaatgacttgattggtagtctcaggagagctggtcagtcaggatgacctgcatgtttttcagatgttacatgattcatctgcttctttctcccctgcaatggctctccattgcctagagatcaaaattcatactcctaaggatagcagacaagtgcctccgtgatcactatctgcctagcacgtaccattccctgccacacaccccatactccagccagctccaccaaattatattccacttccacgtacagcattattcagaatcctcatagctttgcaaaacatcttccctttgtgtaaaattttctattcaaccctacactgtatcaacttgttgagctttcattcacccagttgaacttgtctgttttatttttatgtattcccttactcaccatagagaattgatcacgtattcttctgtgatcttctcttgtgtccactgctctggtaaataatttgtatgacattatattgcaactacttgcatgtctgttccccacaactagactgtgggctcctttaagatatacatctctccagcatccatcaccattcctagcacataggaagtactcagtaactgttttatgaatgaatatttaaataatgaatgaatggatgaatgttctaagaatagcccacctcaccctagaatagacttgatgacaattctctgaagtttgaggtctaaacccacaggtattggacaaaccagttggatctgcagaatgacatataaatagccaagtcataacaatgtcatgatgaagagcatgcattcattccaacatgtttctaatagatccagccaacatttgaatgaaagccacgttctctttattgatggtctttaatataataagccagatccttagatctatggaaggcaatctgggatgctgccactcagtcgttcttacatctggctgcacattaaaatcacctagaaaactactgacacattaaaacaattaggcacctcaacgctaaacaattaaattagaatctctgggggatgggaaggcaggcatgatttaaaaacaaactcccaggtgattctaatgtgcagacaagatggagaactgttgtgtggatcttcttagctctgcttagagggaacactccaaagacttaagtggacataggaaaatgcaattcccctcaacatgaaagtgaccaatgggaaatttactactttacctggaatgggagggaaggcaggacatttccccacattgggaaccaagccaccaagcctatggctttcactagacaacgtacagtggaaattcctgatttcttttagaaattcaggctgagtggccaggcgctgtggctcacgcctgtaatcccagcactttgggaggccaaggcgggcagataacgaggtcagtagaacaaggccatcctggccaacacggtgaaatcctgtttctactaaaaatcaaaaaaatcagccaggcgtggtggcatgcacctgtagtcccagctactcgggaggctgaggcaggagaatgccgtgaactggggaggcggaggttgcagtgagccgagattgcaccactgcactctagcctgggtgacagagtgagactcagtctcaaaaaaaaaaaagaagaaaaaagaaaaaagaaattcaggctgagacagaacaaagcattgttgggaagagcacaggctagctgaatttggaaacaccaaatgttggatttcttcccaactcttccctcagcatggtgttaccggggcagggagggtcttgactgcaagttttctgggttcttggagttttaaacaaagaattggacaaaacgcacagcaaagcaaggaaggaaagcagagatttattgaaaatgaaagtacattccacagggtgggagcagcccgagtagcggctcaagggcctggtttacagaatcttctggggtccaaataccctctagaggtttctcattggccacttggcatacaccccatgcaaatgaagtggtggcccacaatcagaggctgaagtgaagttacaaagttacactcctatgcaaacatctgattggttgctttatgcaaccagtcagagatactcttaattttccatctgccacacagaaatgggggacaggtttgcaaggggagtagcctctggtccttttgttacttaggtgtggaaagttggggttttccttttgatttacttctaagaagtcagcgtaaattggcctcaggttctctgcctccagaccctatcctcctgcttcagtgggaaatacaggatgcatgagtgggctgtggctgcttctgtatgccacattgaactaatgatagagatcttaaactttaaaaaaaaagttttattttgatgagagattctcaactaggggtgcacataaaaatcatcaagatagaagtctgaaatcaagatttctctggagatagaacccatgattttttgtttatcgtaaattccccatgagtaatttttgggattcactcctcattaaatataacgactttaaatgaagcagatctgatataaaatcgattcaccaattcaccaaacttatctgagaaatatcagcacccttttctcaacgtacagaattcttgctttgaaatggttcacttccaaagacatttactcctaaacaaactaaagagtattactcagaaaccattgtggcatacgactccatccaagacatgaactgcaagtaggcaatgttctgttaataatgccagcatctgctctgtgttttcaactggaaagcaagtatttcccatccaactccaccaattcactctttggagtactataaaggctctgacacagtctttctatgccaatggattgggttggccatttacaattactaagattaatttacagaaatatttaataaaaaatctttcaagaaaaaaaagactttgagatgctgatagatcagagcatggcatatgcagctaacatcacatccatgccaatggctatttgccatgctgttttaggtctacatctgctgctggttagcaaaaattacattcacagctgtccagatgaatcaaatgtccaattagcattttttgctcagtgacaggattctgcccagaacaaaaattttaaaacagaaagcacaacagaacagagttttattcatattcttgctgaaaacagtactctgtgaattcttgaatgttttagaaaaaaaattataggaagtgatcaaagtcctccaacaatgtgtttttcccctagatgcagttaagttcaaagaattttggttcattatatgcatgctttcctgatgagaagccttggtctgttctttcctgtttctcgattctgaaagaccatcgccatcgtatttgccatccactacaaatggaagatggagtgaccttctgctaataaaaccatctcctgttttcaatttaaacttctaacgtgacaggaaagtgaattcatcctaatcttcagatttccctgagtggtaataatcagaatttattttatacttatatgttcaagtatgttaaggtactcagcaaaataactagaattctaatgcaagaagactcacagtagaataacccaagatgaaatttttgttcctcgagtgcttaaagcctactcaatggttttccatttcacatagaataaattaccaaggcccggcatgatctaagctctagctgtcccccattcttaccttgtgcttctctcctttagctcatacagactggccccatttcagttctcccagccaacttcttctccaccccagggccttggcgcatgccctgaatacttcccctatccccattccttagagcttcatttcttttgatagtccttcctcggtcatatctatctagccccaccttccctcctgttgtaaagcctttttaaattcccttctttaaagttcctttgttgcactgaccacagtttgttatttatatttttatttgcatggatttttttggtctttgtcttctagtaagaggaaatctgaagaaaggtagagcttaagttacctttgttcatcagagtatttccactgcttagcacagtgctttttacttaatcgcatctcaataaatatcagatatctctaagagtgacttaatgaaagctatattaattcacaatgtggccataccatgctttgtaatggaacagacatcattctcttctcagtcacagctaatgaaactatcttaggaggtcctccctagataagactttttgtctataaaaaggaagtggaaactttcaaggggaattaaatcccagaataataactgccataatctgtagcacattctcactcacaaagcaagtacttcatagcacttttacccctttttgtttcctgtgttataggagaaaaaagtaaattcagagtttctgtatcttctttgttgctcaagatcacaaattaataaggggcagaagtaggactcaaacccaggcccacaggtatctaattcactggtctttcctcaccctaccctcctccctgcctcattcttctccctgtcttgcagtcacgctactctttgccaaagtctggagatgattttcagaggaatctaccctgaaggagaaatatactttgatttccaatttgattgaatgtacagctaaattaacttgctggagaaaatctattttcagtgtatatttttaacaattaacaaacatagtgcatatgttagaaacaaaaaataaaccataaacaaagacaatggaagaggtgaagtaaacaggcctttctctctctctaacccaattgggagtccattgctatccatcttattaaggatggttacagagaggagactcatccatatttttttgtctctctctctgtctggagacagttttacacatgctttgcttaatggacatttccccatggtcaaaattatgttccattcactgtcatttccccatgccaaagttgatttttttgacaagctccactgttaactctgcagcccagatgtttccatggcagcgggtaagctgtggctgcagaaacagccttcccctccacagtcacactggtatttaaaatgataatcgcaagtgcaatgttaaagtcagctaagctttggtatttttatataatgattgtactgtttttatttaaataataaatatccatttcaaaattattttgttattgtgagtattatgttttattcaaacaatgaagattaaaattaagaaaggaaaaggaaggaaggagaggagaggaaagcaggggagaggaggggagggaaggagaggaaaggagggaaagggagggatgggaagcaaaaagagaagagctacgttccaagatgccagtgtcttgtgttattaataaaaataaatttaaagatcaaatttctttttcaatattaagatacctagtaattacagcatttctcattcccatcagcttccaattctcttctcagcatgcctaggaaatttgaatacattccaggaaagaagtccaatcaagacgttactgctaaggtcgtagcaaaggaaatgttcacagcaaagacagggacgaccaaggtaagtctcactaggagatctgctctctctgtatttgcttcatcagcagtttttctttcacatttaaatgtttgagcagagaactatgctccacgagcaagaacccagcaaggctgagcatgcatgaacacagttaacttttgtcaccaaatgcagcttgcagcaaatttaatctgaaacatacttcataatgttaagagtgcttattatgttgcagggtgattagcataaacagtaaacaattcacaaagatgaaattacatttacatggtggaattgaatgtttctccttttctcttgtcctttattctttagtatcatttatatcagtacaataatttacctttaatttgttcaatatagtcaagacatgtagatatgggacacacacacacacacacatagtgccagagtcaattcacaagctagggcaccttatgccccacactcatatcctcttgttcaccattactcaaatttctactcctcctctaccaactcagcctttccacagtctgctcttatggtctctcaatcttgaacacctgattcatatatatatgtttctcacccccaggtctgatcccttacatgcttgagagtccaagataaaatcaaaggaaatataaacaggtattgagtaggactaaacaggtaggacctgttaccacaggtattagtttattattaataccacaggtattaatttcacaaaattaaatgacatttaattaaatgacatttaattaaatgatgtcatttaattttgtgaaaacctaaccagtatgacactgcacatattattataaacacagaagttttggtttaaagggtgtcttgctcagggcaacacaggtagtaagaggaataaaactggccaggaattcggactgccaattctatgctctttctatgtgaacacagaaaagctcttgagaatgggtttgaagatagtcttgaaaggatttaataggcattgtttaataggcgtggtttatttctgaccagcatcttatcccttgagatcctaccttccctgactttatgtgattccattggtgatggaaattattgatctttctctaatcatttcttgttcttccccaaaagctgggtacatgcttcaaggttgttcaatctttttactacattcctttaacactttaagtagtctggaggatgggcataagagccaagaaaggtcattcagcattcatgtctccagaaaacgatcattggactataggaaaaagcttcatttttccactaagtttgctaaactggagcaatatttttctagagctgctggaagttgtatttcctggctgcaggaaggagctcatctgctgtagttgagaaaaaggcagaaagaccagatggcatgctctttcacttctttatgcttttgcacatatgggtctctatttctagaacacctgttttgcttttccctccaaaaaggaaaatatagctaactcctaatcctatcaggtttttgttcctttaggaactaggtcctcttcccctgtgctgaggtagatgttcctgccctatactcgaatagaatcttatgtttacacctataattgaagttatcacagcgcattgcaataactgtctattgtcttttccaccctctttatgaagagctcctcatggagagtaagcaagtcatagttatcattgcattgatgtcattttaaaaaaacgacagctacataatagatgctcattgtttgtagaatgggtggatggtaggggatctaaggtgagtttgaaaattgtttctcaaacttcagaagttattgaaaattatcctacacaaacaagtggaggaaaatttagctccaaaagtcctgaaattctaaattctctgaaattaacatgagtaaaactagacccagtgaaaattataagcagatacattttagcacaatataagaggaaaatttctaccaatcatacacatcctctaatagaactgattatttcacaaactgaccaaaggtgttcaagaaaggaatgctatatgtttcaagattttagtgtcattatttcattatcttctggcttccattatttctgttaagaagttggccatcagtctttcttgtgcctttgaaggtgatcttttttttcttacttcatttcactggttttaagatttttctctttatctttggtaattattagttttagtgtgttctgtacagagatattcttctttgttactcattattggagtttatagcacttcttgaaaatgtgatttgatttttggggtcatttttggaaaatctcatccaatatctctttagacattcttctgttctattttattttttatttcttttttttggacttcagctgtatatatgaccttttcatcatgttcccctgtccttctatttttaatgctattctcttgctgtattattcttggtatttttttctgacctatcttccagttcactaattgtctctttagctgtggttaatttggtgttaaactatttagttcttaatttcagttactatattgtttagttctacagttttttttattctttttcatagtctccagttctctgcttaaattctccattttgtcatccaatttcttgaatgtattaattatactcagtttaaagtttattcctgataaactctaacatatagattacttgtgaggctatttctgtgatctgcttttttatgtgctttttgattaattcttaccttttttgcctgccaggttttaaaaattgaactctaaatattgtgtgtaaaaaattacacagataatcagagctataaaagatattatctttctcaggaagaatttacttttgcttgagacaacagtcacaataaaagtagatcacttactcaccttaatccctccttagtcccccttggtgggccctgatctcaatttttagcaatgtctctcctatatgaataaaaaagaaaactctaattagtttttcaggcaccaaatgacaccagttgggctcaactatatgaacctacttttctctgggtttctgcttgctcaagtactggctgcattggtatctcttcaatgccttcaagattaaacacacacacacacacacacacacacacacaaacacacataccccttcaaaaaggtatcaatctagagctacatacacatatacatctatatttcttactgtcttggcagttctccaataccttcaagaactattgaataactaccaaacatactattttatattatatatatgttgtccaccctttttagtagttcttagcaggtaagtttgtctaaacaaattagcttgccatggccagaagtgaaattccactatgttggagtttgactggataaatcttaaactttatctggaagagtaaatgcaagagaatagccaaggaaatttttgtttaattcaggagaatttgtctttatattataaagttttagtaataaaaccacatgacagtgagacaagaatagagaaatagatctatataacagagaaaggtatcaagagatgttggttatattatatatttattatagtactttttaaatattatataaaaggaagcatttgccatcatataaaatgaatgtcagatgaattaaagatctaaagattcaaacaatcataatgttgaagtagaaaagcctttcgtaggttagcacacaaagtaaaaacaaatgacagatttgtctacattatataaaacttgtatagggcaaaagataccataagcagtgttaaaaggtaaacatataaacaacaaactgggaaagacataaacagcagacaaatgcacacacacacacacacaaacacacacacacatatacacaaagtgggacaggtgaagagacaatttacataaaaggtactagaaatagccaataaacccattgaaaaatgttcaacctcattgtattaaaaaaatctgagaaacaaaataagagttttctaatattttagattgacaaatatttatatatatttttggcaaggctgtgaaaatataggatctcatatactcttggtgggaagacaaactggtacaaatcttatggaaagctactttacaatatttatcaaactttaaaacattcatatcatttcacttctaggagtttcctcctacaaaaatattggcacttgggtaaaagacatatactgaagcattatttctagcagtataaaattggaaattacctaaatgtccctaagtaaaagaatggttaattaaatattcgtgaatatattaaatagtatattatatacttattaaaatgcataaggcaggtctatacttattatcataaactctatattgattagtgagaaaagcaaattataaaaattttatagtatgatgtctttgaaaaacctctgtgaattattccatatacattatgtgtgtaggtgtctatgtactattgtgaattattacatatatatattgtgtatgtgtctgtgtatgtgtgtgcaaggggcttgttgagagagctgaacccagtaaccaacagaaaatggctgtggggtgattgtttacatgccccccaaccccattcatatgctgctatatcaggcaaatcccaaagcttcttttctgatcacttgcagctattaagaaatccagccagtaaaatgaaaacttcaacttcacatccaattgaaaacttctcctctcttgccagcacaggcctaatcctagtttctaggattaatcctaatcctagcggggtagagagaatgtcttctcttacactcttcctttctttcctcctaccgttgttgatgactccaacagggtcaagtcctgaaaaaggaggtgtcagctgagtacggtggctcatgcctgtaatcccagcactttgagagactgaggcgggtggatcacctgaggtcaggagttcaagaccagcctggccaatatggtgaaaccccatctctactaaaaatacaaaatttagccaggtgtggtggtgggtgactgtagtcccagctactcaagaggctgaggcaggagaagttcttgaacccggaagggggaggttgcagtgagccaagatcatgccactgcactccagcctaggcaacagaggaaactccgtctcagaaaaaaaaaaaaaaaaaaaaggaggtgtcaaaggaaaaggacaaaatgtcttactcagccagtgctggctgtgataatcccatctgtcatgacaggcatctaaattctggctccttcatggaaacctttatgggaaccttcaacattactgagggagccactctccacttaccctcctgcaacttctcacagtggttcaccctacaagctcatacttctggggtccctccaccctaacaggccactctttggagcagatttctgtcaagatgtctaaagtccagtggatctctacgcatgacgctcacacattctttttccaccatatacaacttgtcaaactgctgactctccccaggatgtgccatcccgggcagccctagccagactcctgccttcagtcttcacctacaggaaaatagtcacctgtcactacaggcatgtacaccccaactcccacagacacactcgaggctcccccatataaccctccagtctcagtccacctcagtgccctgaccaggatgagcttccaataccccagctcagcaggtattcggccaaggaatagagtgcccatttcctcccacacaggaatgagctattcacatagggagccccctaactgggcctgaaacagaggaggagagaaaagctaacgacctctctactcctacaaattcccttcaaatactcttatttcaaattgatttctagtctacttttactaggctgttagtatttatgtcactggtctccatttgctttgttttagaaaatcctatggggtgtattttgtgcttctctttagaatacggggacccttatcaccaattgttttcaaatttaatgcgttgactgcaaatctgaaacaataggaaatatcccatttagcactctgtcccgtttatgccacacacactctcatgcacgcacgtgcgcacgtgtgcaaacacatgtagtttgttgagcggaacaagatctaggatacccacaaagtgttaacgccggtgatctctgcagtagaattgcaggccagtgtgaatggtaacttttacttttcactctatttctgtattattgaatttgcttataataaccatgcaattcttttgtaattaagaaaagaataaaatagtaatggtagtaataataataaaatattgataaatgctggcagtcttaagtctcaaagtaccaggctatactagatgccttattaacataatgtgttttaatcctctccacagcttcataattacagccttttcacagatgaggaaactgaaattctttggtcaatttagtccaagttctaatctgggcttggcttaaaaaacaaggaagtctgcctccagaaatccatggcaatttaatctttcatagcacttcatagcagtgcccaagtgacaggcagagaaacagtgttgttgacttgactacagactgtgaactgcttttgtgcacctgttgcacccagtacggtgtgctgtgtaggtgtttataagatgttccataaatgcttgttggatgggttgggagatcatataatttatcattcaaatcaggacacttctgatagtgaaagtgggtgctattcatagttacataggtacaacgtgaaaaatcagtactgttatgcacaaaggagttgcacaaaggtcaccctgttggtggaaggaaggaaggaaggaagcaaggaaggaagggagggagggaagaaggaaggaaggaaggaaggaaggaaggaaagagagagggagggagggaaaggagaggagtaagaatacaaccatgttgttttatgatcctgcaaatctttgagtagtgaataaagcttattcttccacaattaaaggcaagaatcttgaaaataaaacagacctgcagggagatggtatatttgtgtaaacaagtttcagttataagttagacattttaaggctaggcacggtgacttacgcctgtaattccagcactttgggatgccaaggcgagtgagtcacttgaagtcaggagttcaagaccagcctggccaacatggtaaaactctgtctctacagaaaaaaaaaaaaatagccgggcatagtggtgggcacctgtaatcccagttactcaggaggctgaggcaggagaatcacctgaacctgggaggtggaggccacagtgagccaagatcatgccactgctctccagcctgtgcaacagagcaagactccatctcaaaaaattttttttaaaaatttaagtcttacattataaaagaggtgggatggaaagtaatctggaagagaaggctgaaagaggagtctgaagattaaaaaaaaataactgtttattttccacttttgacggacagatagtgactgtgttaggagacccagtgaggcatccaagagaaaatgccctatgaacaaagttctttctaacaattcatctggggaaggaaacgagctgggagaagagtaggtcttctctgttgaggattgtgctagaaccaggtcagaggcagcagagatgccagttcatacgcaggcccagctgaggcgcatccaaacctgtcccctcagctgggaggagctgggcatgaaggaagggccagagctggggagtcagagtcaagccctagacacactacttgggcaagttgtgcctcactttcctcatctgtccatctgagatgaaaatagccactttacagaataaggtggaaattcaaagaaacaaaatgtagcagacacatgcctcccttaccatggccattgtctttaaagtacagtccacctgttctggataagggcgagcagctgaggacacgtgctcaactagtcaatgctgtttcatatctgatgctgatgctgtggacaacaggggacttcatgtcattgttgtctcccaggtcacatcatgggctgaaagatagcttcggctttctgagaacatggctctgcatcccaccatttacttccctcttccgaggggattttcctcttggaatcaggctcttcattctgtggaatctggagcttcaccaagaggcaggctgagtgtgcaaggttgggcatccctggttatactaacattgcaacttgtgtttacaacacaagttagggtaaggatgcgtctatgtgagcatgttcatgcgtgtgcacacacatgtgcatgtgtgcatgcaggcatgttcatgtctgcgtgtgcatatatctttagtgggagagaaagaaggagaatggaaaggaccgagcccactgatgtaccacagattatctcccaagcaggaccccctgcatctggaatattcacttgttcccaacatgcagggagaagaaaactaattcacagatacaccatattataaatctaaatttttaatggcattttatgttattaaaccctaatgagaaaagcctgagcagaagagaagtctagcttattaagctcattttttgctctatttttctttttctaaagagattcaaattcaaagtctgcacaacaaaggagcgctcattcccctttatggagtaatatgtttgttttgtttactttaaattgggcttaaattaggcctcagaaggagggaattcattaaaatcctgctctgtgatgttggcaggttgccatctgagaggcctgtattacttctcttgataaagttcaaaagagaaataacaaatgccacaaataagaggatggttttactcagtgtgccaatttaaaatgttttcattagagtataaaatcataaaattagaaagatgaaactgattcttgacaggtagatctttccccacttaaaatatacacagatattgtgtatactatgtgtatttccttctaatatttttaaataaagatatatacacacaaacccaagaacacacatgtgttgtaaaactggtatcttgccttatgcataaatatgggccctgctctttttcatatgatcttatattgttatcattgcttctgccactgactattatttgaaaacaatatttctttaaatggctatataatatcccaccatagtcaggcataaatcatcattaagagttccctttcgttgtttgtaaagattatgtctaattaatcaccattttaagtacgtctgagaagtagccgttgtttaaatataaacttgagaccagctatgtctttaaactcttagaaatggagttttcatgttcaaagaggtgctcattttaaaacttttaggacttttatcgtgaaatgcccccccccatgaaatttgtcactgtatggctcccactagaggggaggtaggctgagatctcactccacccgcaccagccttgagcatcattcatttcaatcatgctgatttatgtgtgtccactgcaaatttttttattattatttatttatttgtttatttttagatggagtctcgctctgtcgcccaggctggagtgcagtggcgagatatgggctcactgcaacctccacctcccgggttcaagtgatactcctgcctcagcttcccgaggagctaggattacagcttaactgcatgaaatttatctcctgggaagtgtaaagtaagactctcacttgaatttttcaaatatgcaattacttcagtactagtttttgaatattctctttcctgttatttgtaaattttctttcatcacacattatttatgattctacagctttccattctgttccacttatttccctattgttttttgcagcttacctaaaagttaaggtagttgggtaatttattttgatatccgatgcttcacatttgttttaatttttttctatattttcttaactatatcctcatgtttgtcctttcagatgaaattcagaatccatttgacaagcttccccactgatttaatgtcctactgaaatcatgctgaacctacaaattagtttggggaatgctgtttcctgttttttgttgtttttttttttttttttttttttttttttgacggagtcttgctctgttgccaggctggagtggtgcagtggtgcgatcttggctcgctgcaacctccgcctcctgggttcaagccattctcctgcctctgctttctgagtagctgggattacgggcacatgccaccatgcccagctaatttttgtattttttttttttttagtagagaccgggattcatcatgtctgtcaggctggtctcgaactcctgacctcaaatgatccacccgcctcagcctcccaaagtgctgggattaccggcatgagccaccgcgccctgccggggaatgctgtttctatacttagcacttgggaacataagtttctaaagtaagagttcaaatctactgtctgctattttcatgttatgtgaccctgggcaaattacttgatcctccctagcttcagttttcttccctggactatagggtcatggtgtcatcattcatagtctctttccagcgtgacacaaatgggcactcaataaatacttatctgttaagaatgaataaattattgaatgaatccatctatattccttccagaaatatgaggataataattcttaggttatagattataagcgctaaaaattaaaaatgcctagcatagtggcagatacatgtttagtgttcaatatatggttattatcgtaattattgtatttataatatttagtcatcttatctggaaatatggaatgtctcaatttattcgcattctcttttgtgtatctcagtacacttctatcattaataccatacatgtttacttattcctaggtatttgctagctgttaaaaatatattttattacatcttctcactgtttgttaaaatggctgaaaacctaagtccataggtgtccatgctttattccaaagtgagagatacttcaccttctaggattatcaaaggagacagctgagaatcatttttatgatgcttatcctgttatcctcttgagcatctatcaggattaaaactggagaggtggggagagtttgcaaattagagactttttagaagagagagcagtgtgcgtgcttcatctcatctatcccctctaccaccaccccaccaacacacggaggacacgcatgaaccctaaggaagagtgtaggatgcttgcttctcaagtcaagtgaaagtagctccactggggccactcagaaaactggttgtgtgtgtcctgagctggggacaccgtggtgtagaatctgattcatgcctgaggcatctacaggacagaagccacagcagcctccagcagagagtagatgcggtggttgggaagaaactgccccccatcgacagcagatctaagaaatctgtttttcctgggaccaggtaagaaccagtagggctatctggcagcacaagaagacttgaacaggtcaggtgtgtggctcatgcctgtaatcccagcaccttgggaagcccagacaggagaattgcttgaggccagcaggtcaagaccagcctgggcaacacagcaaaaccccgtctctacaaactaataattttaaaaattagctgggcgtggtgtcacatgtttgtagttccagctacttgggaggctgaggcaggaggatcacttgagcccagggagttggagactgcagtgagccgtgatcagaccactgcactccagcctgggtgacagagtgagactctgtctcaaaaaaaaaaaaaaaaagtgtgagaagtccaggtgtacatcctccaggtaaggaaactggaagtgagaaaaccagagaatctccttagtgttaggggttctgcaaagtacccacaaagcatttcaagagaaagtgcccttaaaacatctcagagcccagagagtggcaatgcacaatatcaatcaaagaagacattccctgcccacttgccacctcctttctcccaccctcgtccctacccattttgactctggaagtattagcaatggtattagcaagtgggtgaaggaatagaaacgctcacccaaagctagaaaatgggagctttttgtttaaatttgcagtttggactttgaactggactgagaatatttacaggattaaagtgacccaaagagtttttaattatctcaaagaggcctgaaatattacagggcccttcctggaatgtatccaaaagggtaggaaagaatgtgcccttccaaatgactgtgcagtgcagggggaagaacggaatcaggttgttgtctgctatatccttccagttcctatgttcaacataacagttgcatttgtttacattttaatatttttataataataaataagaaaagaaatcatgaagatggtcgagcagtttaggaaactgaaatccaattaattaatcatagaaagtttacatagcagaagatatttgtaaaagtgcccaatcaaaccagtaaatcaaaggatggaccattaaggttatctgctccattgttccatctatggaccgagttacaactaaagcatccatgtcagatgaaactcccctgtttaagaaacctgtaaaggagctcaaatcaagtaaaatctgatggtttctgagcagggcctttgccagggagaacccctaacggaaagagtggacattaattaccaggccataaaactcatgaacgcaaagaacataactttgcaaaattgttctctaactcagcttcataactagtcagggccttcattctatctgaatagattgtagcaaaccatctattccatgcagataaattcagtcaattagctgattttctttccaggaagtacaagctaagacttagtgacttagtgtctttccaggaagtacaagctaagacttagcttttgggggtgggtgttttgcccacccacccccaaagtagcatctaactatggggagagttttggtgggatagggtatctggtctgcagctttccacctatatctgatggaatctgctgggatataattccccttatataaactctggtcattgccttgggtcccttctgtatctactagcacagtggtccccaacctttttggcatcagggactggtttcgtggaagacaatttttccatggacagggatgggcaggggaagatgcttttgggatgaaactgttccaccttagatcatcaggcattagattctcataaggagcacacaacctagatctcttgcatgcacagttcacaatagggttcgcgctcttacgagagtctaatgccgccacttatctaacaggaggcggagctcaggccgtaatgcttgcttgctcacccaccgctcacctcctgctgtgcagcctggttcctaacagaccacggaccagtactggtccacagcctggagggtgggaacccttacactggcatattctgtcctgccttaccttccattggtaggagcacagaagccatccttcttgttctgatggccaagttcttgggtaagcaaatcttattagagtaggtaattaggcagatatgagcagggcaggagagcccccccagcccacccccccattgctactgccacccactcctaagaacattaggcaaccgtcaggtgatggcgaggccgggcatgttggctcatgcctgtaatcccagcattttgggaggccaaggtgggcagatcactcgaggtcaggagtttgagaccagcctggccaacatgatgaaacactgtctctactaaaaatacaaaaattaggtaggtatggtggcatgtgcctgtagtcccagttacttgggaggctgaggccggaggatcacctgagcctgggaggtggaggttgcagtgagccaagattgagccactgcactccagcctgggtgacagagtgaggacctatctcaaaaaaaaaaaaaaaaaaaaatcctgtctagctgaaataatgattggctacagctggcaccagggaaaggcattctcccagtagatagaaaacacctgaagctggtgatcagcagcttcctgtaagatcccaggagtttggcaagtgggttcaagcatgtgcactaagaggcaaaatagcagattttaaccagtatatgacctttccgctaggaacactcgactggtaagggaaaaacacctcaagtgattatgcatacaatgtcagtaaacacactgcagcctctcataagtgctggcaggccactgtgcatgcggacagtctgatccaggggaaaaatgaagagaggagaaacagaaaccccagaaccatgccaatgtataaaacccaaagttaagggccaaatagcacacttggatctctcaagtcaaccacttggccctcttccatgagtactttacttcctttcattcctgctctaaaacttttaaataaactcccactcccgctcttaaactttcctcggtctctcactctggcatatgcccctcagccaaattccttcctccgaggaggcaagaatcaagtttgctgcagacccccccagatccgccactgctagcatactgtcagccactctaggtccctctaaggggcatgtagaacttttggacgttgccccttgcctctcagatgtcataagagcctattgggtggggggatgctatctcaagccctccctgcctagacctgccttattcccacttatgctgtacagctactctccaaagcagggctaggggacttctctaaagcattgccaccccctcaggctttatctggggaggaagctacacagctcctctattcttgggttgccctccctgtctgggctccggtctgctatcatctatcccttccaggcttattcccaggcaggcagacagggccaggcctgcctctgggtctgactggcagctaagctcccttatccttctctgaagcttctctttacccaggctgtcactttccattcccaatatatagagggaattaactgtatacctggctttctgcagagttttagcctttgaaacttaaaaaaaaaaaaaagaaaaaaggaaccaactcatcttttgccttttccaaaaaaataaatgctttagatttaaaaactaatgcctctgctctgagtttcaagagtccatttggaattcaaatacaagaaggaaaaagaattcacctcttttcttatttccttatgcctccctttcatgaatgctctctgaggcaattaatgccgctgagtcaaaggaaacaggtcacggtgtgaaagaaggaaccaaactttatttaatatttctgtaatacttacgttgcaaatctccaaccatctaacaatactcaccacatgcacatccacttcctttctattctagtttcctgagcctaagggtagggagagagacatgtacatgttcattaattgccaaaaagtacacttcaaagcaaactgaagtgatggagatcagccatgacagatttcttccaaatctttgctctcctacaccagaagtatccctggaaacaaaaggcagaaataaagacattcttacctgaagggaattattgatcagtaccagctctgagtactcagaaaattatctgcttacatgcaattttaattttataaatttgacaatgtgagataaatgataaagaaattctatcccaatgggtcctacatattggacagtgaacatatttttaactttgtaacaaagggagattaatatacctccaacatgaaatgactttggaattgtccaaaaagtgaactgaggagatatattaattaaattctcccttgagcctcaagaaggtgaggagggcctagaaggtaggcttgagcaaaattctccaacaaccacaattggaatgtaagcagaaggaaacaatctctcgttctttctcagatgaaaggaaaatggcaatcttttctagcctatctttctctatttgaaggactaacctgcagaaaagaaattagactcatttgggtgtcttcctccacaaggcagaattaggtttaagtttcagggaggaacattaaaaaaaatatatagcctcattgctccaaatcacaattagcatgtttcaagcaggatgagaagcaagaaaaaataaaaggagagagatcaaggcactgctaaggcacagagaacaatggcagtggcttgacatcatatcttcagtaaacatgttgactccaacattctcctgtccatgcccttcccttggcagaccctgtcgggtgggagttcatgcattcatttcttgccattctgtcatgttgtgacctcagttgccacttggtggcttctaccatcagggcttcttttgtacccctctgctgcatccccggccttcgggctatattactctagcctgatggggggaagtttttacccctgctaatatgataacttctttacaagcaatcccaaaaagcagactggctcttgtcattttcattcactcatgaagcatgtgttcaacaaatactaaattagcagctatgacatgccaagcactgggcttggaactgggggcacagtggagaagaaggcaatgatggtcactgacctcgtggagcacacagtctagtattgttattgccgccctttcccactacacctcagataagttcctcaggtgcagagaaacaagtggtagcacctcctgggccgaaagtattcattcccatccagcatcttatgactttctcatctctcccccttagaatgaatttcctgctcactcaggcactttccctcacatgcctttttctactacctttctcaaagatttttatcaccatgtcacagaaaccagcttttagtctatttttgcattactataaaggagtacctgaggctgggtaatttataaagaaaagaggtttaattggctcatggttctgcaggcgatacacaaagcagagtgctggtatctgcttctggtgagggtttcaggaagcttacaatcatggcggaaggtgaagggaaagcccttgggtcacatgcaagggtgggaccaagagaggggtagcaagagaagagaaggagaaggcaggctcctttaaacaaccagttgtcatgtgaactaagacagtgagatctcacttaccacaatagggaaggcaccaagccattcatgagagatccaccctcatgatccaagcaccccccaacaggtcccacctccaacattggggtttacatttcaacatgatatctggataaggcaaacatccaatatcaccagctctccattacatttctcattatttttcccaaggggcccatagggtcattatgaaaacaattaataaaacattatgataaacaattaatttctttatccttttaattcaggatagttcttttattcttcccccaaatcctacactgcagggacaaccagcattccctttcttcttagggaaagatatggttttcctggtcaaaatctagttagatagtcaaaatcataatttcaccttgcccatagttgcctattctgttcatacttaaaaggacatttgtggttctgaacatcattctctgggataaggaggctggaatgtcgaattgggaagaggggcaggtttttgattgctgatctatcagtgcatatcatggaccactccatcaccaaatgaagcccctgatgacaaacactactgaactggggtcaaaagacaagctcatttctcctgttgatcttgaaaatattccttccttttgcatattatgaggtgtagattttatggtgagggaagcatgtttgcagaactgagaaggaattgagaaagacgttgctgttgcaagatggacagggcaggacctgaataattataagccttcatgaaagtttaaacctctgtgctgtcattatttgcctactcccatgatgacagtgtgttcatgaggtcagtaaaattgactaaagatagcagaactgtgttatccagggagttcagagtggtaacagctgagaagaggacatcctggtaacaacaacaaaagagagtgttggcttaactgttttgaatgcacaggtgtaaaagtgatgcctagaaagtatagtgattttattgactaatagcagaatcatctaagtgggagaaacgatgaaatgcacccaagatttctgagagtttgacagcaaaattaatgcataaatatgatatgaaaaattttcctggatgaaggaaaaggcaattttgtaccagcttaataaaaattaacctaaccaaagaaagtctatggcaatagaagagggttgtttagccaaaaatgtgtagaaaaatggggattgcagaggcaaaatttggcattgtgtgctcagttctttccaggggaaatctgggagagtcgccaaagcctgtgtgcatttcccttcaagaggccatataacgtattggttaagaatgtctctaggatagtcagactaacctggtttcaacaccagcgtcctgactgaattaattaattaattactatcttagacaagatatttaaattatctgagccttagtttcttcatctaaaaattcaagataattataacagttccttgttgcttcttcttcctgggcacacagtgagagcacgtttcccagcttctcctgcagttttaagggtggctatgtgacttatttctagccagtggaatacgagcagaagtgttgttcaacctttccaggcccgacccataaaaacttcccatatgcaatcttccttcctctttacttttccactggctagatgttgcagaacctccaacatccctggtagctgaatgactgtgtggagcagagcccctttgtcaacctggaatcacctttcatttggggacttatttgatattagcagttagccatcttaattcatacactacctaattattttaattaagttatttatttatttctataggtttttgggaaacaggtggtggtgtttggtcacatgaataagttctttagtggtaatttctgaaattttggtgcacccatcactaaagcagtgtacactgtacccaatgtgtagtcttttatccctcacccctctcccaccctttcccctgagtccccaaagtccattgtatcattcttatgcttctgcatcctcgtagcttagttcccacttatgagtgagaacatacaatgtttggttttccattcctgagttacttcacttagaataatggtttccaattccatccaggttgctgcaaatgccattatttcattcctttttatgactgagtagtattctatggtgcatatatatatacacacacacattttctttatccattgattatgggcatttgggatggttccatattttttgcaactgcaaattgtgctgctataaacatgcgatacactgcctgttttgttgtaagaggtgaaagagatgagtccatgtaaaacatatgagatagtgcctggcacacagaaagtgcttaaaatgtgaagtgattattcttattctgaactagaccacccttctttgaggctgatgcaggtctgaggatggcaaaattgataagtcagactcagctgtggttttgttgactttttaaaatggcccttttggctactaggcaccacacagaatataaaccagtaaaatacatactggcatgagtaagcctctctcgagtaatgtccaatgcctctctcgagtgatgaacctgagatggagttggcctagcagctcaaacagggtgagcaggttgtcaagtcagaagagcccagaactgcacactcattgtctttatgccttttaaccttggcttgggaggtgaggggagaaaggggctatatcgtatctagtctataagacgtcacctaggtttgggtatatattttcttgttgaaccacagttgtgtaatgttcttactttcatatttcatttcttaccatttcactgtgtccactgtaggtttcagtgcaacagcacagtccacaacctaccacatcctaccatctttctcccttcatacaaattgttcactttccaaactgatatgtatttcaatttagctttcctgccctctgtatctgaaaaaattatgtcctgcagtaaggacacaaacatctgccataggagaggaattcatattacaaattctattttgattatacaaacataatcagtatatatattttgattgtatagacataatcagttaccatgcagccatgcaccagtcactctctagcccctaccttgcattatttttttcatgacacttacaactatctaaaatcctattatttatttatttatttgcttacttttttattatgtgcctttttgctctgatgtaagctctatgagggaagaaactttatcttatttgctactgtatcccagtatccagaacagtgccagtcacaaagtagacactcaagaaacattttttccaaatgaatttattgaatgtgcagatgtttgtcatgggtggattttcctgaatttgttcagttctggggaactgatcaaaacatttctagacaaacagagctaattgcttggacccaggccatatctagtaccgagatcaggttaccttgtgagtatctgggtatccagacagctggaatcttcagtcaatgtgactgcacagccataaaaatgttttaggaatgaatgcaaatttggacattctctctatgtaaatgcatctagcttattgtcactctattacattgcaattcattattcccatttctggtgtcaaaaaaattacagcccttgagatacttagcttagaggagaaaacgctgagaagctgagaagagatataatctgccaagtacaagtcttgttaaattcaccttaagtctttttggttaaggtcattaaactgatgtatgtgaggaacgctctacaacaaaggattttgtggagtctctcaggttattttcataaacaagaaggtaaaaggtgagtgaattgatgtatgattgaataaccatctctggaggatgcagccggggtctttggttatgaacgtcaacagattggtataaatacctggaatacattctgatcaaatccagatcatagagctaggaatgagagcaaacacatgggtggcagaatcatgtcccagaaatatcttattgagctgtaacaatgggctgaatttagcaagactgaatttaatagagatacatatcaaagcatgcacttgggttcaacaaatcaatcacgtatctggctagctaaattaaattcttgaaaatcgaccatgccattcccaagtacacggccaataccctgaaaaactcagtctcagacaccttacacagcccaggtctagagcactagagccctactgcccaaggtcaccggggtaatcagctaatttctttctttttattttagagacaggatttcactctgttgctcaggctggagtgcagtggtacagtcatagctcaatgcagcctcaacttcctgggctcaagctacccttccacttcagcctcctgagtagctaggactacaggcgcatgcaccagctaatttttttcaatggggcctcactatgttgcccaggctggtttcaaactcctggcctcatgtgatcctcctgcattggcctcccaaaacactgggattacaggcatgagccaccgtgcccagcctaactcatttcttgacccattgggtacctcagttcctgattttttgttccattctttgactctgactaaacacttaccctttggctctgaccatggggtctcctctgccactgcgatcctcttgttcttgccttgacttctggcttacactccctgccctgtgagcccattcattgggacccatactggcaccttctctggccacagatagctcaaggacagaacgcttgaagcattgaccaatcttggcacacaagaagaaaatgcaagtccttagcctgctagaagtgcaatgcaaatggtctaaccatgagacagcctaataaaaacaccagtgtaggcttgagccacgttgctgtatttgggtcactaaggacagagaggctgttgcctctccctgtccactccagcagagtcagaccacatcttgagctaggaccacttctgcataccacatatgctgtgtatgccaagaattaaaggtgaggggatttgaaaccagattctacaatcgaatgtctcccctttattcccagagaagaaggaaacaaggaatccccttgcttctttaaaaaaaaaattagcaaattacaaaggtaggctcaatgaagaaatttggagaggacaaataagcacagaagtatatgtatgtaagaccgggtgcggtggttcacccctgtaatcccagcactttgacaggctcaggcgggccgaccacctgaggtcaggagtttgagaccagcctggccaacatggcaaaaccctgtctctactaaaaatacaaaaattagccggacgtgatggcacatgcctgtagtcccagctggggacgctgaggcaggagaattgcttgaacctgggaggtggagattgcggtaagccgagatcgcaccactgcactccagcctgggcaacagagccagcctctgtctcaaaaaaaaaaaaaaagaaaaaaacgtatcttcatgatttttctttcatatttttctactgcaggtttattagagaatgcacgttaaaaatttacaaaagtttagagatggatttttgtcttttaaccttgagaacacagcaggcatacttctattctaattctgatgtttttttttttttaaaaaaaggaaaacataaatattcaaaattagttcaaaaggatgttcacctgttggctccctagcctgagactctgagcggtaaccctggttcacctggtcacacatccatagtgggacatgtaattattttatcaagggcaaccagatagcttggaaagcatttcattatccccaagttttctttgataatgacttcgttttgtaagcactgaaattcatcagatccagccatgtcattcaaggctggctctaatgtctccttcccactccccacctctggcatctttctacgctttcacctggagagaggagctgctcttggttcattgtgatccatgccttttcctctccctgacttgtgtcaggtggctaacctgggggagtgccaaagaaacaataactacgttttcatcctggtttggggaggctgctaatttcccttgacctccagctggtttccaagctgttttaggagaggaagacagagtttccaagttaggagaggaagacagagttccaagtgaatgccatccacataccaccttcccagaccccatagctcacaggcccccataggtcatcagctcttactttctccctctggaaaggaatggaagaagaggtgaaatgttacttcatttggaagcctcctaccatctctatctgaacctggctccctctccctaggcagcaaaaccaaattcccaaacctacctacgtcagcgatggcctgcttgatatttcagagaagagggacccctgaggacttcacctcagattcttggaagaatgtgattcagtccacagtagcctttcagagactgtatactcaagccagaccaaagtatccctcttcccattcagagccagtgaggacctgtctctgtccctgctcctcctgtgccctctgtgtgcggtgtcctttcccatctcctgctggcttacatggcttcaagctccacctcaaagcgtcctgcaccaggcattgccagcgatctccccttcacaatggtctagctcctatggtctgtgtctccttatttcttctgaccttctttctttcacccctgtgttataaatgtacttgttctaacttcccccactgggctataggtttctttatgttacagaacacaaacctaccattcacttttgtttcccctataggcattcagcaaatgaacccttaacctaaaagctgcccaagtttctggtgcccagggaaaagctgcttatttctgtttcttctggggcacttcctaagctgtccctctttcaaaacacacttacttcctgccatcttccaattctcactcccaggaagctcccgacagagctctattttccagaatcagggagaggcgcctgggttctttcccagcacacgcctgtgttctacatccccacccaataccacattaacctgcaggcagggggaggtgccaagcagtgcccacaaacaacagctcttccacgctcctccgttccctccccagtgtaaacccatcacacgaccttgctccactcactttagggagaagtttgaggctcccctgcagatgtgctcccacttcacagggaggcagtgggcacagtggaaagctcagtggcccacaagttggaaacccaggctctcagctttctctgactctgatatcttgaaaagccatttctcttccagatcttgtctctataaaaataaaattagtgcctcccaaaccttttccagctgcataaccctttgtttaagtgaaatcttacatgaaaacgaagaccattaaaataaataaaaacagaactgctctggttgaaattaaagaggatgtggcttcatttctctttcctttatttccttacctccagctgccctgatgagagccccttggaacttttgggataaagtccaaaaaacttcatccctacaggacatttgaaaaacattgatgtgctgcacccattaactcatcatctagcattaggtatatctcccaatgctatccctcccccctccccccaccccaaaacagtccctggtgtgtgatgttccccttcctgtgtccatgtgttctcatttttcaattcccatctatgagtgagaacatgcggtgtttggttttttgtccttgtgatagtttgctgagaatgatggtttccagattcatccacgtccctacaaaggacatgaactcatcattttttatggctgcatagtattccatggtgtatatgtgccacattttcttaatccagtctatcattgttggacatttaggttggttccaagtctttgctattgtgaatagtgctgctataaacatacgtgtgcatgtgtctttatagcagcatgatttataaacctttgggtatatacccagtaatgggatggctgggtcaaatggtatttctagttctagatccctgaggaatcgccacactgacttccacaatggttgaactagtttacagtcccaccaacagtgtaaaagtgttcctatttctccacatcctctccagcacctgttgtttcctgactttttaatgattgccattctaactggtgtgagatggtatctcattgtggttttgctttgcatttctctgatggccagtaatggtgagcattttttcatgtgttttctggctgcataaatgtcttcttttgagaagcgtctgttcatatccttcgcccactttttgatggggttgtttgtttttttcttgtaaatttgttggagttcattgtagattctggatattagccctttgtcagatgagtaggttgcgaaaattttctcccattttgtaggttgcctgttcactctgatggtagtttcttttgctgtgcagaagctctttatacatacgtaacaaacctgcacgttgtgcacatgtaccctaatacttaaagtgtaataataataaaataaaataaagaaaaacattgaataatcactgaggagtccttctagtgtgagtttctgatcccataatgtcaaagctggtgatagctcgatgtggaaggaggtcgaaggaggcaaaaggtggttactgcggagaagctgagctctacggcgggataagatcagctgcctacacatggcagatgagccacacactgccaatcctgggccttactggctgtggggctgctttaggacagggactgcattctattaattcctgcattctcacctctgcactgtggctggatcaaagctgtcctttctctatcatctttgatgactcttgctaagtttgagctgcttcccacacctcctctgataaagcattaaattctacccagcgttgcatctgagctagctgtgtatatgcctatcttgttaccgtcctgtaagacagttgaaggtaaagatggtatcttatccacctctgtataccaatggctgccacagctcctggcctaatggcgagcagtcagtaaatgtgggtgaactgaatgatgggaacatacagattcagaatgctgctgtcctggcctgaaaaatataaaacatgcaccttctcccatgacttacatataaatcccctgctttgccccataccacattctggacttagttggaagggtgtcaagagttccattcccaacgcaagcccatccgagtatctactctctgtggagcctgctgtcctttctcaggcacaatggagtcctgagggtttaatttggggtttattttttcttcatgtgtttcaaactactatcatttcttcctttgtcttcttcctttgaaacaataacatagcatagcatagcataacatagcatagcatagcatagcatagcatagcatagcatagcatagcatagcatagacatgttgcatccagtcctgggcttgtcccttccatcctaggactgcttgtctagaaataagaattctagctggtggcatcaggttctctggggctctggctcctcagcagcctctggaagtatataaagggtctccatggtgtttcaagatctgggtctgttcaagtcaccctacgagattttggtttcatttgctcatgatctagatctgttctctgagtgcttgctgcaagtcaggccatctgctgcctgctttatgtagactgtttcatgcagtgctcatatctcttggatatagatattttttatcatagccattttgaagatgaggcaactgagggtcacagaaagtttatgaccacaaaattggaacttgaatttggatctttcccacccctaaactgcatcttcacaacaacagtaagcaaatgtttactgagcacttactacgtgtctaacagtagtctgagcactttacatgattcactcgtttaatccttgcatcaccttttgagtgaactactgtagtgccagttcgacagatgataagactgaagctcaaagaattcataaaactcacacataacaaggatgcagtcagtggcaaagctggaatgtggccccgcccggctccagtgagcacctacccacttcaggacatggacactcttaacgtgatacttcactgtagatattgtggcatctgtaccaggtgtcacactgaaaaaaggataagtgatcacatcccagtctttccacccatgaccatgagcagagagactgatcaccagccactggtaaagacaagatagtctttggcatcagcctagaccctaatgctaagctattattagctctctcctagtttcctgcttcctaagatctctcatctgctcttctcaggcagaccacattccaaaattgtaaacccaggtgaatactcacataagcaaaatataaataggataatgtacttgctgggagaatatcatataatgcagtccagcaaaatataaataattgaggagctatctgctttggattatctgtgcatttttcactggcaatatataatgagacccctgtttaacactggggatgggagcaacgccctgatggaatttgacatgtccaaaaccaaattcctggctgtgcttccaagatctgctcctcccagcctcttccccttctgggttaatggaaactccactttctccattgctccagcaacaaactttaagtcacccttggctcctttcttcctcttacactccatctgcagttcatcagcaaatcgcactggcactgccttcagaatacatccagaagctgatcgtttctcaccatcaccatttgctaccactctaatccagtttctctccctcagctctactgacattagagctggataagtcttcgttggaggaggtgactctgtgcactggaggatgtttcgcagcacccctggcctctacccactagacgccagcagcacccgcttcctaccagcccgagttgtggcaaaccaaacctctccagacattggcaaatgtcccctggggtgcaacactgccctttgttgagaaccactgctctagactaagtcattgtccagctttcctttggtttattgcaatagccaactacttggtcttcccatctccttgccccattacagtctgttctcagtgtagcagccagaggggctcttctgatatggaggttggatcatgccactcttctgctcaccattctccatgacttctatctcactcactagaagccaaagtccttcaatagcttaaaaagccctatttaatctgcaccagccccactacatatgacctcgatgacccccttttctctctctctcctccttgtgccttgaactgcaacctcccccacccccacccaggtcttcttgttgttcctgaatacaaagcacactcctgcctcgggacctttgcccttgctgttccctttcctagaatgccctcttcccagatttctacatagttcactccctcacttacttcagctcttttctcaaatgtcatctccttgcttagagcttatctgacgactgtaaacacaattacatcgctccctccagccacaggttttcctgttcatactgttttattttcttctaccccaagagcacttattaccatctgacatactatatatttccttacttatttgtttattatctgttgggttattgctggatccctagtctctagaacagcacttgttttcatagtagtcacttaataaataatacatggatgaatgaccagattatatcaaacttcctttagaacatcagtaagttctgaagaacatggtttgatcaaagaatattcaagtcaactataacaagctttattttcattagtttctgttttacaatgtgtctttccttaaatactagaggagggaagataatgctctcattttacagtgtaaccatttaacattttctcaggcctatagaaatatcccctttgttcattcatcaagcacttatcatgtgtaccacttggtcagctaggttcttgaagaataaacttaggcatatgacataccatgctcctccagcatagggtggacagaggcgaaacccacaggaaagatgaaaaaagagggcagtagttagacatggttaagatgagatggcacttatgaagaaggcatttcttgatatgagcctgaaggtatggtgggactctggcaggcagacaaaaaggacattccagaagagggcagaatgagctgtgggtgaaaagttgagttaataagcttagaggagttcagggaacagccaaacagccagcaacagaaagtttaagtgagtggaggacaataagcttgtaaaggtgggttggagttagaacacagaatgccagactcagttgggccataggaaagctccagagggcaagatactgcagaggtcccaagtgtgggttccagagtcagtaagctctttgctctgttgaacagcagtgtcactcctcagtgcctcagttttgtcttgtgtcaacttgagcagatgatagtattcacctcatcactggttatttcgaggatgaataacataacgcacgtattaacaaggtgcttggttatgaagtctcaaatgttagctaatattactcactatttttgtgtgcaattcagaaaacatttttccaaatcagcaccaattgctcagaaatatttggtaggtgattccccctaggctgtgaaatagctatgaaagaaggactcaataagctgctaatgaatagtcgggcaaggtatacagatgtaaaaagaaaaacacacttagggatacacagacatgcgtgttctctcctccatccccggactccctttcatgtctctctctctctgacacacacacacacacacacacacacacacacacaccccttttccagatatccctcagctagagctttgcaaacaatatgtcatggtaagcacactcctaacgtagttcctccagggatgatctctgagccaatatggaggaagatattgtactcagtattttccttgaaaagcctgtggttgcttggaatgaagaaagcctgtaataaaatgtgcaaaaattaataaagtaactattattactgtggaagtgaagtacaagaaacaatgtcctagttaatttattcgtgaccttgaatttatattttcctgattttgttacacactgaatcaattctttatgcagtgaaagtggaaatacatatgaaactcatagctcccacttcctactcctggtttataaaataagtttatttttctgttaatgaaatctgactctaaggctacactccctattgagagactacattcctccctatgctagaatgatcttttctgtgatcacctctgtatccaaaatggttgggaaaattaaataagcttctgtagggaaaatgcttagactaatgtctagctttattctaatagaatagaaagccctcaataaaaagtatttattattattattcctaccatcaatatcattccttgcctgttggactcagaatttggtgagccaacctgaggccaaggatgtcacgtgcatagtagctgttgaagctgctcacaaatattccagctccttttccttcctggcatcagtagaactgacttatgcaaccaccgtggttgtgtggaagaactacatgacaagttctagccaatgggttgtgagtggaagcaatgagtgttacctccaggcactaatgcaggaccctccagtgctctattttcactctgccacgcaatgtctcaaataatggttgtagcttgtatctcagtcctcaagtgagaacaatgatgagatggagcaccaacctgcaatgggtatgtagtatgaacaagaaacaaatctttggccaggtaaggtggctcatgcctgtaaccctagcaccttgggaggctgaggcaggaggactgcttgaggtcaggagttcaagaccaacctgggcaacaaggcaagacccctgatatggtttggctctgtgtccccacccaaatctcatctcgaattgtaatccccataatctccaggtgtcgagggagggacctggtgggaggtaattggatcatcatgggggcagtttcccctgtgcagttcttgtgatagtgagttctcacaagatctgatggttttatgcttgacagttcctcctacacatgctctctctcttgcctgctgccatgtaagatgtgccttgtttcccctttgccttccaccatgattgtaagtttcctgaggcctcccaagccatgtggaactgtgagtcaattaaacctctttcctttataaattacccagtctcaggtattcttcatagcagtatgaaaacagactaatacaacctccatctctacaaaaaatcttaaaaagtagccaggtgtggtggtgcatgcctgtagtcccagctacttgggaggttgagataggaggatcacttgagcccaggactttgaggctgcagtgagccatgattatgccactgcattccagcctgggccacagagcaagactctgtttcaaaataaataatttaattttaaaaagaaataaatctttaccctttcaagtcactggtatttggattttttgtaactgacccactccagcctatgctgactgacacataccagtaacttggttatctaagaacaagctactgcattacaagtgcactgccaaagcaggaggcccggcctgatattccaaaagattcttcaccagtggatgttcctgccacagcatttcacaaagttttgttttccagaaaatgtgggggaagggaaaacaaggaagggtcccttatgctcacctatgagctcccaatgttatggtcatttctggccaatactcccttgatgataagatggccccaccatcagacacatgcttcatcctcaagtgacaattgagagcctgataccaatcacaccctttctctatcaccatgacatttcggtatctttttctacctactggtctcagggcatactatctccatcagagattttcaaataatgtttagcatcaaaagggaaagagaaagggagtttccaggcctgtaaaaacttgtctccttatgcaaatatgctccaccctgccccgtaatgtttacattttctatagcaagaattatggaatggatggcttcgtcatgcccaaaacttcctcccaatttccacacatcaggcaccttgaccattctcctgtcccttcataacagtgagtagaatcttttgttgaccatttctcaggaccttcaccattttctgtcttcaggcctgtctccaactgtgagaggttttttaatatctgggatttaaatactcctcctttctctaccccaaatgcctgtacaatgtctgacttatggggtctcacctctgaagacccagctcaggtatcacatgctaatgaaagtaagatgctacctcccatctaccaccaactatggtagagacagccattcactctttcaggtcctcgacccccacccatcctgacaaacattcacaactggctgtcttctccttatagactacctcccctactaggttgggttctcctggaaaataggacttttgttgatttttgtttattttcttcatagacccaacaactaatgaatctcctgatctatcctttcagatccttaatgtatgtttgttcaactgtcaaatgaatatacagcatatatgttcacaaaaattcacacatctagttaaaaactcaaagtttaaagtatgatttgagctgtagtaagaaggataagtaagaaagacttttacaaggaaaaaaaggaagcacagacaaataaatacaggggtatgaatccatctctgtctactgttaagactgttaagctgtgggccttacagtttcagatggacactttaaagtttctagttttggcctgtccagaccacaagacaaatacgatggcacattattcctgtgagttcacccttgcatcaccccaagagtgagcgcctccttaaattttccaccctggcagctgcactggccttaggctgcccttgagagaatgcctcaaccttgaattgatggttgttaaatacttaaatattttaaaacctaatgtgttcgatgaggtcccttctccttccggtatgaccatgccaattacaggcatgttctgtgtataatgtgtctcattttgacataccaggcagcaatgtggatatgcttggaatcattcttgactcttcccccctcctctcatataactagccgagtggtggtgagacatcctccatcctgcttttctaggaaagggtgaagttagggggagcagaacaggagagggagagcacggcagatgctgtggggtgacagtaactggctgactgatctgtgaacacatgtgaaagaccctcgggtattctctaactggttgagacttggaaacaacgagcaggtggaaatagagtcagagcaatttaaatacttacaacgcatctatatccacagggtggtggggcctggggcacctggtttcttacattttcagcatcacttctcgctcctccaacacaaacacccgtccccccccaccaccatgccaataggtcttttctctaatcttgagaacacccaattcatttccacctgtactcttcccccactccccaccccccgagatggagtcttgctctgtcacccaggctggagtgaagtggtgcggtcttggctcactgcaacctccgcctccctggttcaagcaattctcctgcctcagcctcctcgaggagctgagattacaggtgcacgccaccatgcccagctaatttttgtatttttagtagagatggggtttcaccatgttggccaggctggtctccaactcctgacctcctgattccacccaccttggcctcccaaagtgctgggattacaggcatgagccaccacgcctagcctccacctgtactatttggctcatactgtccaactatctatacagcctttcccttctccggtgcttattgtatcttaccttagcaatccttcaaggcccactcctatttgctatattttttttcaaccaatccctgcctctgctctcaacatctgccacactgtattatcatccacgtagacatttaattgcatgctgtctcatatcattatttcagcgtttcccaagtatttatcttgcctgcctaacttgattgtcttccctctgagttcaggggcttggtcatgaatatctgctgttttttctgtatgagcctttatgcttccacagacagtagaagtttttgatacttattcgatgggtagatgaagagatagaacgtaaatgtggtgtttgcacacttccttgtatataattctgccataatggtatcactgatttctcattataactcaagtagttttgctagattggagatagacttttctgatgtgttcatgctcttactccatcactgggaaggtatacagtagagggaaaatgcaagtatactgcctacataatcttcaggaagtcaagagctatcacttcatccagtttgccacaccagaaagagggaaataatagcggtgggagtgacagtaatgattaagaggcattgtggtcacttcacaccatccataggctgtcttttttttttttttctttagctcccctcaaagcacatggactaatagagtaacacaaacgaattggcataattccttctcctgctattgttactagttcaagtgtgggcacttgccccaacttgaggccaagagtatagggaggatgtttacttgctgcttctgggaagaagcacttttactaaatgagactttcccaaagctttactttttttttttttttttttttctttttgaggcaggttctcacactatccccaaggctggagtgcagttgggatctcagctcactgcaacctccgcctcccaggctcaagtgattttcgtgcctcagcctcctgagtagccgggactgcaggcgtgagccaccacgcctggctaatttttgtattttttagtagagacggagttacaccatgttgcccaggctggtctcgaactcctgagctcaggcagtctgcccgcctcaggctccctaagtgctaggattacaggcgtgagcaaccgctcccggcctcccaaagctttagatgaagctgacactatggaaaccttggcagaagattagaaagaaacaagttcctgatggcattgtttagcaggcaaatcgatgtatccctgaaatccaacatccaatctgaagttaaatgagctttaccgttcaagccacttagagttggacttttagttaacttgcaaccgaatataaccggcacatatgtactaaccacagtgataataatatctgcactacaaactcacaatcgggagagtaaaagctaatcacatatgtgaaactgctgtgtcagctttattatgcaagtatttgttgctgagagcctcttggttaagatactttccctcaagagacagaacttgaaaagaatcttaaagatgtggagggcttcggttgttcatatcgggattttaaaaaacgtctcaactgtgtatcagaaagcttaagacattaagattcaagctgaacagaacaggaaatgcggcagatactgtacatgacaaactttctaggaggaaatgatttacataaaagctggtgcccagcacagggtaagtgctaaataactgtttttaaatgttatttggaaaaaaaaaaaaaaagattaatcatccatggtacaaaatttaaaagttacataagtatggagtctcgcgtcttccctgacccccacccccagtcatccaatatatttttccagaactagtctgatcataacatatatacatatataatttttttcctcacaaatgtcagcatcccagacactgttctgcatcatttttttttacaaatcacataatgtatcttgaaggtctttccatatcagtgtctagagagcagagtctatttgtttttaagagctgcagacaacttcaagtgtggcccaaccataatttacgtttctatgaatttaaccggtgttatcgttggacattttgactgtttctggccgtttgtgatgtccaacaatgatgtaatgattatccttgcagggacttcacttcgcaggagcagaagcccatttgcaggataaattctgagttgcggaactagtgatttacagggcagaggtgcagtctttgtcttaatttctgaattcacgaatgttgaatgtgatgaattcgtgggaagccccgcagggagcctaagcagctctccagaggctgtggttgtcacggatgatgattgcgggacccgcagactgagtctccaagcgctccgccccgccgcgcccctctccgcgggtcccaccgcggacccgcccctgcgcgccccgggccaggagcccctagctgcaggaccaggcacgtgcgattccacgtgagcctcccggccggagcgcagatgggaagtgcgcatgcgcctaccgcctggaaagtaggtcagactcctcctctcacgtgacctgctccccttagctaccctcggcgcctccccgccggggcgcagccgggatgcgctcggcagccaacgtgacggggctgggcgcgggcggctccgcgagcgcccagcgcccgcgaggatttgccggttctcctcacacccgagcgctccgctcagaagtcgggcgggcaaaagggagcgcctcgggaagtatctgggagccgggctggaaatgaatggggcccggaagcgagctcaaatcgctgacacctggcaccgggctgcgtccactttcatgcttcctaaggcagttctgcctgcaagaagggaacgcgcatcgcctttcagtagatcacaccgatcgtttgcacgtttgcattctcaatttctgcactatatagggcaactcagacatgaaaacaatctttgtaagaagaagtggaatgctaatggttcctggagttttgcaggaatattccaccggccccatttctaatctcccactcactccctccccaaagacactcctactagaaagcttatcggtagatttctcaccttccacaagagacttcaggggcgctgctgctgctgctgctgctgctgctgctgctggaggctggagggggttgggagcagggaacgaaggcaggtctgaattagctgaagctaaattctatatatcagaaataattttatttattgccccattgctttctgatttttaacttgttgcacaaatgacagactctgcctcagtgagttgcaatccagtggagggcactaacaggcaaaatcatgggttacaatgcagtgggctatacatgttttaatagaggtgtgcccaggtgttatataagcacagtggtgggtaccctgagtcttgaagactaagtgggagttagctggcagagaaataaggcagagggggtggaaagtgttccaaacaaagggaataactaatagttacataatattttcctctaagaagtttttactataattgtcttagtcatgcatatggttagaatatgtattgtttacatttatattattctaagacagtcttgaatgaacattgttgtgcatgaggcttcccccctccacttttaataacccctaggagtgggattgctatataaaagacacaaatattttgtaacttttgataaagtattgccaaattattttcaaaaatatgttgtactcatttgtaccaatatttagccttcagtcagtaaattgcccgttatttcaaatcaatgaagccttatgacattaacacttgattcattagaatatgccagaaatcataatacacatgcatttctgctttatatgacccatgacaaaagtctaattgaattcaagtttaaaaatgggaaaatatcggatcagtacatttcattcttacagggaacacctaacatggacaaggtgggaggtgggggcaggagtgaaagtgggacaaactaaagcctcaccaaatgcctgtctctgattgctcttttcttactgtacgtctagggtaagagataaagcagctcacacaagccagaacaagcaaagaggttttcacacccctctgcaaatgtcagaacagtagcagaatcaaagggacctagggtttgacctcttcagaggtcactttaacttgcagcagaaaagctgatcaggtgttgatgaatttctggaagcctgcaagcttcctaactcaatttctgttggcatctgtatctgcaagaagaaaacaatactgtgacattagaacatttgtgacgaaaggtaatgtaagtaatgtggacaatgaaaggagaacgtatcttggttttgcctgtattaagctagatcactaaggaaatctgaagcatggaacagagttataacttttcaaacacatggttgtagttcatactgcggttattttcctaatatctatccttcaccttgtgtatcagtcttataatttcagctggtggggggccttacctcctctctcagttcaggggttgggcttgaccaaattaacaaatcagggtggtcccattgttttttgtttcgtttcgtttgggttttctgtttatttatttgcctttaaaattttattataataacatttaacatgagatctacccttctaaaattttttaagtgtgaaacattattgttgattataggtgcaatgttgtacggcagatctctagaacttattcatcttgcttgactgaaactttatgcccactaattggtaactccccattttgtcccctccccagcccctggaaaccacctttccactttttgagtctttgaatttgactattttgagttcctcagataagtggaatcatgcagtgtttgtctttctgtgactggcttatttcacttagcataacgtatgcaaggttcatctatctcattttatattgcagaattgccttcttattatggttgaatagaattccattgtatgtctataccatatttgctttatgcattcatctgttgatagacatttagtttgtttccaccattcctctttttatgaggattgaaagagttcctgcagcagatgcacttagaagagtgcctgacatatattaagagtacatgaagtattagttgttgttactgttgttattattagtgtaacaatgactggttcaatcagaggaaagcctggacttgttatagttactcgatgccatcctttctccttggacaggaatggaagagcaggtataactactgatgccctctttccacctcgagaggatccaacccaaccacacacctgataaacagggagaagcagaggaagctacaccctgatcaaactacacttgaagcctgtactccctcttgacctttgagctgtttgagctaaatgcatcccatttgttaccttaattattagaattgggttttcaggtgtttgtcaatgcagacatcctgataccaatgtctaggtcttcattttattttatttatttatttttagacagggtgtcactctgtcacccaggatagagtgaaatggcatgatctcggctcactgcagccttgacctcccaggctaaagcaatcctcccaccccagcctcccaagtagctgggactacaggcatgtaccaccacacacagctaagtttttttgtagagatggagttttgccatgttgcccaagtgggtcttgaactcctgggctcaaacagttcacccaccttggcctcccaaaatgctgggattacaggcatgtgccagcacacctagcccaggttttcattttaactaaagggtcaaaatgatgacacagacactccattttgagcatgcacttgttaaagaatggaattaaatttcacatccgtaacaaatgaataaaacatccaatgtattagtttgctagagctgacataacaaaataccactgactgggtggtttaaacagaaatttatagtcttacagttctggaggctagaagtccaagatcaatgtgtcagcagggtaggtttcttcttagtctctcctggccttgtagacagccatcttcttcctgtttcttcacatggtcttccctcttcatgtgtctttgtcctaatttccttttcttgtgaggataccagtcatgttggattagggcctaccccaatgacctcattttaactaaagtatctcttcaatgaccttatttccaaatatagccacattctgagtactgggagctaggacttcaacatatgaatggggcaggggaggggacacaatttggtcgataacatccaaaaaggcattaataatatcatatggattatttgataccagatctttaccttgatacaaatgctgttctccaagtttttgtttaggggctaggaaaggaagagagattgagaatacgaaagctcctctctgagaacagatccagaaaaacagcatgtaataaagatttggctaagcccactctcaaatatctgtcctggaaggacaattcacattgatgacaggaaagctaatataaagataactttggttatttaactctttgtgagcctccgtgaggatgggcaactttgctgaagaatctgtttcaggctgatcttttttttctccgttaacaattcttagctaaagttttggtgctttactgaagaatggaatctcatttctggacatggttgaacagctgtttctgtgttctttctaatttcagtgaggcaaggctccaaaaacaaatagaaagcttggtttgcattctgaggttggccattgaattgaatggtttgtactgcaggaaaaagctgtgtgacatagaagtcacttccccactttgggctcagtttctcttaatgtaaaataagacagttggactccatgatttccaatgttgtgtccatctattcaccatatgattgattggaaaaaaaagtattttgatttctttgctagtaaaaactgaggccaggcatggtggctcacgcctgtaatctcagcaatttggcaggcaaaggtgggcggatcacctgaggtcaggagttcgagaccagcctggtcaacgtagtgaaaccctgtctctactaaaaatacaaaacttagctgggcgtggtggcacatgcctgtaatcccagctacctgggaggctgaggcacgagaactgattgaatctgggaggcagaggttgcattgagccgagaccacaccactgcactccagactgggtgacgaagcgacccagaccccatccccccaaaaaaacttcatttatcattcccgaaaccctttcctagcatgcaagtgtctattaagctccatctgcgtcaggtattcatggcagacaagaaaggtacatttctttgagaatcagatgatccatatcgcccattgttgagaacatctgcccatctttatttcattgcctaaattcctttttcttggagtgaggaaagagacagggaagaacaactgtttgtagtagcagccagcattggaaagaaaatatctttttgttgctagtcagtgtactaaagatacacacctggctccagctcagaggtttgtaaccagggatgcgcatcaaaattacccctgaaatttctaaaagcacatgtctgtaactctacttctcaaaattttgaatcagtaagtctgaaggagggcctgaatctgtggaaaagtcctacagatataatgctatgggtttggtctaaccatttcttcatttccattaaatcactcccaggtccttttagtcagttataccaaatcaccttgtattgcacattattggaaatatacctgcatttgaaaggaacaattcggctgggcgtggtggctcacgcctgtaatcccagcactttgggaggccgaggcgggtggatcacctgaggtcaggagttcaagaccagcctggccaacatggtgaaacctaatctctactaaaaatacaaaaattagtcgggcgtggtggcaggcgcctgtaatcccagctacctgggaggctgaggcaccagaattgcttgaacccaggaggcagaggttgcagtgagccaagatcatgccactgcattccagcctgggcgacagagtgagacaccgtctcaaaaaagaaaacaaaacgaaataaacaaacaaaaacaactctttctttcccaaagttacatattaagtgttttagttggttgtgagaaacacaattaagtgccccagaaaattttacctgttttgtgatccaaatgcagttagcatttctgaaactagatataatgttttgctatggagcttacatattgtaaacagcaacaaaaacttagtatggtatttgcgataaatagagagtaatatttgatatcagtgttcttttttaatcaccgaggtacattctggaattacagcactaaaataacaaaagacttgattccaccaaccctcctggtgggcttatttaagcaaattgtatttgtttgccgaactgtaaataaaacaggttctagccttccattccttcagacttgcatttctgtagctgcatatggaatttgttcttattagactccagtaaagagcgtccagggatagaaaaagaggaaacattactcaaaacacaaaacatagtaaaacaaagaattgcccatttctttcagaagtccagctcttagagcagtggaacaaacagacgttgcgcagtgaaacagaacagtcttgacccccagctccttcttgccactggtagtctacatgtgcagctgtacttgtgacattcccttcagtactcttacctgcccaaaggtggtcatcacactcatatggcaggtggctatgaggatcagagtagagatgatacatgtgaaatgcttggcacgtaatgggcaccctcaaatagtcacaggcatcatttttattattttcttaggaaaaaaaataggtgaacaagccaggatttactggtttttttctttcagagttttatattaatgagataaattcaaaaggaatttgacaaaatttggaaggttcatatttgcctctttgtaaatagagatgccaactctgtagtggctgcttctctatagatgaagcacaaaatgttaaggtatacgtgacattttcaaaggcatcaaaggaaccctgtacaatgcctctgaactacacattagctgtgaattgatggcttcacttgaaatctaatgaaaactcaaactctctagatttgagttgctgctacaacttggcacgatctttttcaatgtgggggaaatgtatccaaataggatatgtagtgtttaaaatatctcaggttcttatagaacctaagattagtaagtacaaagcaggtggctgtaaactgtaccctggttgttgtaagggaatgagagaagaaaattgagcccttaaaaagattaacctattcaggttctgaacctgcttggggacaaactcatatatcaacctaagaatccagacaagtggaagaagaaaggaaggaagggttgtgatattgagatcagacattcaaactcaaggggagactttatacttattaatggtccagtccccaaagaagataaaactatcataaattttttgcaccaaataacataacataaaaacataacacaattaatatagttgaaataacaggtatatataccagctatttactctatagagaatacattttgtttaagtgctgaaacgtttataagagttactctttttttcatagttttatatcaatgagataaattcaaaaggaaatcgactaattttggaaggctcatatttgcctctttgtcttattatgtccctaatatcacatattgggactcaaatacacatttgataaattatcagatgtgggcatagtgttagcagtggttgactctgaagatgaggttcagagtgatcttaacttttttatgttcctttatattgtttgaatattttataaccaacatgtatcatttctataatgaaaaataaggttattttcatttaaaaagaatacctactattcctgaacactaaccatatttaggggcaaatactaagcatgtgtcctgatatatttcatttcattctcacaacaacacctgaagtagaatgtcaaagattgatagtttccctccccacacatgtcttttctctactacttctataatcatagaggatttaggtcgacatgtgccacccagctgaagaccacatttcccagccttccttgctgctaagtgtggtcataggatgattaattggatgtgagtaaaacagatgtgttcaatttctgctccctctccaccttctaacctttcttgctgctagaacatgaacccagtgaacgtggtcgagaaccctattcaacaaagctgaagacagccaccctttaggggatgcagactaacaagagagaggaaacctgtgtgcctagtaccatggagccccagagcagctgtggactgtgtataatcagactgttgtggagggagaaataaacttcatcttgtttaaactgtgttaatttggtatctgttaaagcagccaaattaatcttctattattattttacattgtgtagcttttcttacaagaaatgtaacatttcccttatgttttacaaccataattattaaaaatattcagactttattttatgttgaatatattttaatgctcaccaataatgcttatatgcctcaacatcacaatcatgcccagggcccctaatgatatctttccattccaggaaaaatgtacaagtgatatgtttccacagttcttacatgcttgaatgacaatttgattgcttttagaattcttgagtcgtactcttttccctctaaatctctagggactcctttaaaaaaaatctactgggctaaagagagagttgagatatttgagagcagactgatcatttcttcttttaaagtaacttgatttttctactagggtacctgtggactgtaaactctagataaataacatcacaaatgtgacagcattggtcaatatttaatcatttttaaaaaacattgtagcctcttcaatatgtagatttctggctcctgtcattctatttccttattatatcatttaatttttctttctattcatttatcatcttcagaaacaccaactgttatctaactgattcatcccttcaacaagtgttaagtaaatgtcggcttacaaatgttggctcttaatattactgtgtgccaggcattgttctaggtgccaacactagaataatgaataggatagaaagcatttctactccgtggagcatatcttttagtgggaagagaaaataagcaaacagaaaactaagcaagataatttcagatagagatatgttttaggaagaaaaaccaggttgatatgatagcatgactgccatgaaccagtggatcaaggaaacttcactgagctgaaccctgagtgacttgaaaaagcctttcatccaaagatcctcaacccctctttctctgtcacactccatatccaccccacagaaaatcctgcttaggtgtttgcgttttaaatttgtgttaatactattattgttgtgtgtgtgctgagggcatctgaaagtacatttcaaaatatatcttgaatcagaccacttatcatctcagctgctacaccctagaccaggccgctttattcatcagcttctcttcctgcttccatgcttgtgcctaccctccacagtgcactttatatccaacagtcacaaaatttctgacaaataaattgtatcacgtgcacaaatccttataatggtttcctatggcagaggagttattttctagcagaaaccatttattccttcttcctttagtaaccaaattaccccgttttagctaggcacatttcccagcttcccttgcagctaattttgaccatgtgaccatattctggccaatggaatatgagtagaaatgaggtgaacaatttccaggttgtgccctcaagaggaaaaggattgtcctctcttcctttctctcagttcttttggctggaatatggacccacgtggtggcaagctgccctctgctgtgtagatgacaaaccctgggggatggtggaaaaacaagaaatgtggctcctgatactgtggaaaccctcgggctgcttacccttagattgttacatgtcagaggaatgaacttctgtattatttaaatcatctaagctctttagggacatgaacaaagatgatgtctgccacttctgaatcatgcccttaaaagaaaagattgccttgcctttccctgtctctgctgtgtgggatgcaaacacaatggcagcagggggcagccatcttagtttcagaaatggaagcaccatcttgaggagagcagagcaaccctgcaatcccaggctgcctatctctggacagttatatgagaaagaaacaaacttctaacctgttggaacccctctactttccaagtctctgttacagcatcttagattctacccaactggcgtcttttacttaaaattaagtgaaatctgaagttcttaacatgaagaagggtatgcctatctcatgggaggtgaacagctatcacagtatctgcaagaaagtaaatactaaaagtatatcactttccttcatctccctgcacttcactccgtacatcattttaatgcctggaaccctaaaatcagtgtaaccaagttttaatgagaagctaaatacctgtaattagaaaaaattgttcttaggagaatagcatcactacataagtatgtcagaagatacctcactatatttttgacatgacaaaggttccaggtttttgggaaagtggggcattattgattttatgccttacaactgtcatcgttttacatccaatctatgccttaatcttctcactcttctcagagtgcctacaggaatgaattcattagacattcaagaggagaagcttgatgtgttagcacagcatcgtgataccagcgcttttcttagacagttaaagcctgagaatgtcaacccactgctagggcattaattaaattgggcaacgatcagagtcatgattaggacattcgtggaatagcgaggggacgcctcatctcgcccagcccccagcggctgctgccacaacagggaacaaaaggaaccaactgggctttcattaaacaccaaggatgagatatgcactttatatatattgtttcctccatttcctgcaaggttcctataaaatggtcattacgttccccattttagtgatgagacaattgaggcttgggagacttggctatttgcctaagaatgctgaaccaggcagttataaagccagattcttttccatgtctgcatgtgttaaagctcatgctccttctctcccccttcctcattccttccccactccccaattccagcctctgaaaatataacaaagagaggtgagctctagtttgggaatcaggagatggcaattccaattccacctctgctcatggcgttaggcactcagggcttcagtctcctcatctgatgtgaaccttcagactcttgcaggaagcaggacgtggaatctgcagctggtaaggcgtcacctaaacggcttcgtaatcagcatattagactgactcctctgctcccactccttaaatctacacacatcctctggggcacagcttccttgcattccccaagaaaaccaagaattaactgcttcgttcattacttttttttttttttttgagacagagtctcactctgtcacccaggctggagtgcagtggcacgatctcggctcactgcaacctctgcctcctgggttcaagcgattctcttgcctcagcttcccaagtagctgggactaaaggcgcctgccaccacgcctggctaatttttttgtatttttagtagagacgggatttcatcatgttagccaggatggtctcgatctcctgatttcatgatccgcccaccttggcctcccaaagtgctgggattacaggcgtaagccaccgcgcctgggcccattcattacatttttattaaagacctcctaggttccttatattgtgtctgggttacactgataagacaaaacctgtgatccctgacctcatggagtttacagttaagtaggaggccaaaggtcaaaagcaaacagatgaagaaacagttactttaaaaagcatgcagaaataaacgaataaggctttgagaaaaagagtaacactactttagagaaggcagctacttcagaaggtgatgattaggctgagctctaaaggatgagaaggaagtagctgctttgggaaaagtggccgatatggttggatatttatttgtcccctccaaatctcatgttgaaatgtgatccccagtgctggaggtggggcctggtgggaggtgttagaatcatgggggcggatccctcatgaatggcttggaactgtttttgctataatcagtaagttcttactctatgagttcacaggagatctggttgtttaaaagagcctggcaaccccacccccctacccgcctctctcttgcttcctttctttccatgagatatactggctccccctttgcctttcaccataattgtaagctccctgaggccttcactagaaatagatcctggcaccacacttcctgcacagcctgcagagctgcaagctaaaacaaacctcttttctttataaattacacagtctcaggtattcctttatagcagtacaaaagtggactaacacagtggcagaaagagcttgaggcagagggaacagcatatgtaaaggccctgagactggaaggaacttgacagctttgagaaactgaggcctgagctagtgaagccggaaatacagtcaggggttagaagctgcaaagcaaggcttgaaagctgtgggaagtagctgacattttaactgaaatgcaacagaaagccagagaattttaagttcagaagaagtaattgacccctttccctctttaatcctactccctttttggggtgaattttattgatgtttaacacacactgggaagagtccacacattgtaagtgttcagctcaatacattttaaccatgcagaaatccctatttaaccatcacggagatcaagaaatagaacattatcccaactccagcatctctgatcatattccattccgttcacttacccaacccagtcctgtgctgaagctagctcctatggcttttgagtgccagttatcatagatatggtcattatcttggttatagtaatggcttcatgggtgtacacagatgtcaaaatttatcaaattgtatactttatcatgtatagtttattgtatgtcaattatacctcaataaaactaccaaagagaaaaaagtgcctgaaacatgctcagtaagcatttgttgaaaagataaataaatatggactagattaggagtcttcaaagatggtggaaatcgagagtatcattggatatttgcagtcattttagtcctgtgttctcaggtgacattacctgttggggctttacatttgtaggagagtgagatgctagaaagatcatttggcacacagtaataggtaataaatattcaaaattcattacttcctatttatttcactatgttatacacttatttatgctcttgaggttatttatctattgtatctgtctagtagaaatatcacataatgctatgctatagcacacacttctcctactccatgttaagtgatgtcatgttagtaggttgaaattggcaatggttaggagtatttacaccatggacattagccagcatggctttcttgctcagaggagagccagtcgttaaacatttatcaggcccccacccaccctcaagagtatgatggctgctaatcatactcataatcataggatatttatatgcaagcacatacccttttacatctgatttctttgaccctctccacattacatttgtgggattcatcagccgtgttgtgtgaagtggattcactgagggtaaaacgaatagcagggctacaaaaatgaaagaggtggaccccagtcaagaggtacatttagctagattccgctacaggaaaatacctgataatgcagttagcagggggagggacagatttgggctggaacccaaggcaaatggaccagatttctgatgtcaaagaggagtcatagcttctgggaagggttataggacctggtatcactttggaggagaaaagactgaggactgcatgaaaggtgaactatatctggtcttaggagggggcactggctacaggatttgtaactgatcgttggaggattaggtgttcaggaaatgaacatatggtaaaggagatgaggctcttgtagacaaggcagattgcagccatgatattaagatgccttttgcagaaagaacagtattattgtaggtccttggtttcaaagccttctttggtttgaaagaggatgggaaaggtgactaaacacacaggaagagaaagaggaggaagcttatctcgatggtaaaattatactgataaaatattgggtggggaaaaccaggatgaggattataggagataaaggggttgatttttttcaaggtgcaatatacaaaatcctgaatgaattaaaagaagagaaaatatttccattcttgtgtgtgtgtttatccattcatatatttgatatttatgtttcagactcattcaaactcagtgcaattgactaagaggcaatgtctgagtctagaattttgcttttacagccaaagtctctaaaagtggtagctggagaggaaaagaccatgcacttcagagcagaggcaggtgggggagttgagagacagagagagagagagccagggagagagggagaaacatggagcagaggaaagaagctagcccctctggttttcctcccctgccctccctaccaaccaactcagcaagcagtggcaggaagatgcgccaggggaaagcattctctcttttctttctttctttttttttttttgagacagggtttcactctgtcactcaggctggagtgcagtggtgtgatctcggctcactgcaacctccacctcctgggctcaagcaatcctcttgcctcagccccccaactaactgggtgtacaggtgcaagccaccacgcttggctaatttttttttgtagagacggggtttcaccatattgcccaggctggtctcaaactcttgagctccagtgatccatccgcctcggcctcccgaagtgctaggattacaggcatgaggcaccaggcctggtccatttctaattttttcaactgactagtactcaactgtagaactgtctagattgcatgataactagtcaggataagctctaatactcatctagaaactaggacagtgtttttgcagtatgataacagaaccgcataatatgtcggaataaccttttgtagtgggttctgtcccttcaaaaagatatgtccaaatcctaacccctagtacctatgaatgtgaccttatttggaaataggatctttgtagctgtaattaagttaaggatgtcaagatgaaatcatcttgtatttagggtgtaccataaatccagtgactggtgttcttccataagagaaaggagagggatatttcagacacacagacacagagaaaagggccatgtgcagagactgcagtgatgcagccacaagccaaagaatgcctggggccaacagaagctggaagaggcaagggaggattctgccctggtgcctttggagggagcgtggccttgcttacacttcaacttcagacttctggcctccagaactgtgacagaaaagtttctgttgttttcagacactgagtttatggtaatttgttagggcagccatagaaaactacccaccttgttaaaaaggcagatacttcaactccattccagactattcaacaggaatctttagccgcaggaccaagaatctgcattctaaccagctcctctaaactgtggtattataaagtttgacagctactgatgaagaacaactgagtgtggcttttgtctttcagtgctgaaatgatcctgaattgtaaggtttatgttttttttaataaaaaaaagaaaatccaggccaggcacggtggctcatgcctgtaatcccagcactttgggaggccaaggcaggaggatcacctgaggttgggagttcgagaccagcctcaccaacatgaagaaaccccgtctctactaaaaataccaaaattggctgggcgtgatggcacatgcctgtaatcccagctactcgggagactgaggcaggataatcaattgaacccaggaggcggaggttgccgtgagccaagatcgcgccactggactccaggctgggcaataagaatgaaactccatctccaaaaaaaaaaaaaaaagcaaaagaaagaaagaaaatcccatgggctgcctgccatcttcttaacaaagaaccagaatggttaggcaatggtatgagatacccagattactagttttcggcggcttgtaactacttaagcactgactgagtagcaactggacccacaagcctacaaacacgacagtaggtcccacttggacaggaagttattctgactcagggtgtgcagaaactaataaggaaggagagctgaatggtcagggttaagtcacagtaggtaaacagaaacccaagctggggaggtaatggagactatgggaagcgctgataacaaacacgaccaacattcagatttggataaaagctgacagcaaaggaggaaggaccacattactgaactctgtaaacgatatttttcactccttcaggggcaggcaaataagaagagttgaaatgtgagagttggaaaaaacaatgcttggcaaactgatcagtttagatgacccacctttcaatgacccaccatgttggtgttgccccagtgaaatctgtatatttaagccttcaaacagttactgaatgtcttctatgtagtgggtatactgtttggtggaaggacacatgtcaagaagaaagaaccacacccttgaggagcagtcagggagatggacatgaaagcaaaagtgttttgctttgtgctcctgagagcacaaaggaggactaactttttctgggggcatcaggaagatttcaccaaggaaggcagctgagcggagccctgaagattgaaacagccattcatctgaccaggacaggaaagctagcatgaagcatgagagcacgccaactcatatttattgagcttgtcctttgtgccaggcactagtctaagttttccctaggtattaatgcatctaatcctcatctgtgagcttggtacaattattctgctcacttcacagttgggaaaactgaagcacccagaagctcagtgacttacccaaagtcacccacccagctaattcatggtggaaccagcattgagctccagtggtcttgttccagagctcctttttgagaaccactgagatagacttagactgaattttagtttctgctccttactagctgtgtgacctcaacatgttactcaacctctcaaagcttcaatatcctcatctacaaaatgaagaattcagtgggcatatgtacttctgtctgcctggggttcgttcctcttggaaattgctcctcctttccctctaaccatcagtgccagttggaatggtcatgttcttaacagccccattactaattaatccaagaatagacagctgatctaagctgggcctatctaaactcttctctgagaattttttttctcctaggctgaagtgcagtggtgcaatcttggctcactgcaacctccgcctcccaggttcaagcgattctcgtgccttagcctcctgagtagctgggattacaggtgcgaaccattacagttggataattttggtattttcagtagagacaggagtttgccatgttggccagactggtctcaaactgggcctcaagtgatctgcccacttcggcctcccaaagtgctgggattacaggtgtcagtcaccgtgcctggcctctctgggattttttaaactaaaactgagaaagaaaattagtccctctctggtggaggaaaggcaaatatgtaaaactcctgagctactggaagtcacatgctccagtgtgtggtagaggttaagtttgcagagaataaaaacaacacaaaaagagaaggaagagactgaaaaggctttcaaaactcctgcatttgcctaagccagttcgacttgggtttatgacataggaaagaattttcatcagtaagaaatagtagtacctgtttcctagggttgttttaaagatgggttaccatgatgcatgcaaagaatttagcacagtgcctagcccagtcagtagtcagcaaataatagttcttactgttacaataatcagtggcattcttcctctagtaagctttgcattccagaaaactggacagcttgtattcagactgtggtattcctgcctgtgtagaccgtactggcattcctcgcccactccctgcctccctgatgtactcttattctgtctacagaaccttacttgaagctcatctataaagacttctttgagcccttcggacagagttaatcactttcccactcatactccctttttccttatttatcaatgatacctatcacactgagataggtatttggttaagttgctatatccccacctgactgtaaggcctttgtgaccatatttctcctccttgctttagtcctcagtgcccagcacagtgcctggcctaagaaagccctcccatcagtgttgtgtgcattgaggagcagaggactaagttgtcgtctcaggaaagcagacctgctgaaagctcatcaatcttaatgttccctgcctgacaccaaaaatgcattaacagatggggaatggtgtgcttggaacctagtaaaagtgaagtcgaaagagtcaggaatgctgcctccagtgctgtacaaagaccagcagatgcaatgcctttgaggcaataataagtaggaagaaagtaaccctagaatgtgtctattgatgtgtaagatctaaaaccacagcgggccaagcaagacccttcaggatgcttcctcctgcttctctcaccctggctgcaagtccctgggatggaaacattcacatccacatgctcaattggaaagaagtactcggcaaggctatgcgcacccggctggcactgcctgatgtcattaaagtcatgcgattcactccccttgctctgattccacgctcagcaagaaagctcccatggagagtatccctacagggcagggaacacattgtccagctgacacaaatttttaagtattgcttgaagttcaacacgcctggcatgctccttagaaagacctcctttttaaaggaaagctatgccgggctaatctggttgcacatggtacatgccagtgtctgagtcaaaccagttgccttgggctctataattggatcaattaccaatgttccaacaaagatactcatttacaggtataaggttagccaatcacttatgagatggctcctgtgagactccacccaatgcagaaacttcaaagaaaatggtgacaatgtctatgaatcagaacctttgttttgggattaagacacaataaagggagggaagttggtcctgatgccctacatgatgacaggccattgttcaagttctccccaggttttcaggatgcattggtcatgaaaatacttggtccaccagagcatgcatataccctcagcatggttttgtggtcttgctctccacttgcttagcttaaaaataaactctgatcacctgaggatacctggtcttatatttcccatgcacataaaagagcctgaagtgcagcttagaaattatatataatttttaattttgattttcaagttatattttagaatgtggttgatgtcagtcagtttcactcagcctaattgacattggatcctaagcaaattaaagactagattctgagtcatggtgattttctgcctctacagctcaactgtctctaccttcagttgcatttactagacttgaaataattttaaagtgttagttaatccacaaacttctattccttcaccctttatgaagatataggaaatatctattctttcctgactctggctgagtggctatttggaatctgctatatttgattttttttattgaacttcaaacttgtgttttttggttttttttaaattatactttaagttttagggtacatgtgcacaacgtgcaggttagttacatatgtatacatgtgccatgttggtgtgctgcacccagtaactcgtcatttaacattaggtatatctccaaatgctatccctcccccctccccccaccccgcaacaggccccggtgtgtgatgttccccttcctgtgtccatgtgttctcattgttcaattccccttttggagactgggagcaatagaatgtagctgcccctggtgagagaaaatggtgagaagaaaaaaggatgtgtgtttggatgaaaagtagcttctaatatcatggactacatcaacagttttgcagattcataagtgggagcatctctgcaaaggagcagagaaaccagaaaatgcaaaaaagccccaaatagcaagccctcacatttgtttagcgcttcacaatgtaccaagcacctccacatgagttatctcatttaatcctcctagcaactctgcaagctgggaagcacaggcattagtttatatttcacacaaagaaacttgagatcagagaggttatccaaggtcacgggacagaagcaggatttgaaccagttacaaacggtgtaagcttattgaatgaatgtttgtccttcatttactggagcaaggttaagagtgcaagcactggagtcaagcagacctgttttcaactcatagcttctccatgtattagctagccataggatcatgacaagtcactaatttctctgggcctcactgtcctcatctgaaaaatgggaataatgaaatataccctatatcattgtcccaagtaatacataagataatatatttaacaggtctaatgttgctccagaacacagttaaacacacaataatttatgccttcttcatgctgttgttggcatttgttgtagtagtagaagtagtaatagtggcaggtgtcaatgtatatctggccccaaatcctgcgttcattctatgcaacacactgcactgatttttttttcttctccttttgccacgcgtattttttctttctcttttatacagttttctttcatcctccttcctatcacatgtatagaaatcctaccatcctctgatttgaaacacacatacagacacatgcctgatttagtacctcttctaccgatctacctgtcttagtctttcccactcatttacccaaacaatacagggctcagggaaaggacggggaagcctcaaggaaagcacagggaaggactcatgctcctttacataagtcagtctcagaggagggcttggcattcccaacaaatgttttattgttttggtttccatgatcctacaccaagtgaagagatttgagggtctccagtagttaagctaattagatataattttcctttttggtgctttagctgagttagaggtttcaggaaggagagaaggaagaagcctgggttaggcatatctagcctaactcccacgtgatgcctttcacttctgaattaattccctggataaagtaccctttctgacaacgagataaacaggttcatccagaggtttggctcactagactataaagcccttcataaccacagtgctcgtctccatccaccccaggctcctagccccaagtaggctacagtggcaggcattgtgtgctcaacaaggcttcacacccactgggaatctgaaacataaacactgcttacactgcaaagttctctctgcagacctgcaaggctggtgccaaaatggctgcctcacgtctgcccccaccgggctgcacaaaggactccccacccaatctcactatcaaaacctctgaaatgacaggacaggtggcaaccactggctgggcaaaaggctgatttccagaacttcagaggagagctgtgctggcatcctttaagaagttgattctggggaacgtttcttctatggtcattcctatttttaggacagttttaaacctccagagcttctgctattcctttctccttgaagggccaactgaagggtttttcagtggcttgtcaaatgttctttatctagtatttgtttgttcgaatttctctaacaaagaggtttagttttgacttactgtttaagcacatgcaggttaagacaggagcactgaggcattactagttgtaaccaaagacatccaataggcttaattatttgctcatacacaaaaaagcaaattggataatgcctctgcttttggctcttatctaacttaatgtggacaactttgtagaggtcttgtcaacaaactgaatgagccactgaaagtgaggcattcattttagccgtaaactttggtgaacttttttctgttgctggatatgaatcagatcccaggaaacttagaaagaacatagaaatagcattattctgtccttagtgataaaatacccatttttcctcgggatcaaaagtttgggtcacccacaaatacacagtcaaataattgtcagcaataacatcaaaagaattcaagggggggccgggcgcggtggctcacgcctgtaatcccagcactctgggaagccaaggtccacggatcacctgaggtcgggagttcgagaccagcctggccaacatggagaaccccgtcgctactaaaaatattaatactaaatactaataccccatcgctactaaaaatactaataaaaattgccggatgtggcggctggtgcctgtaatcccagctactcaggaggctgaggcaggagaattgcttgaacctaggaggcggaggttgcggtgagctgagatcacgccattgcactccagtctgggcaacaagagcgagactccatctcaaaacaaaacaaaacaaacaacaacaacaaacaattcaagggggaaatgaaagtctaaaacaattggatatccccatgagtaaaaccaaccttaatccttacctcatagtatacacaaaaattaatttgaaatgggtcataaggctaaatgaaaaagcttaaactatgaaagttataaaggaaagtataggagaatatctccagaactcaggagtagtcaaaagtttcctagttcatagcaagcaataatcatgaaaaacaaattgataaattgaactttgtcaaaattaaaaactgctcatggaaagacgttattataaaaactaatcagcaagccacagattggaagaaaatattcacaacacacaaacatctgacaaagagactatccaaagtatataaaagaactcctaaaattcagtaatcaaaagataaccaaattcaaaaatgggcaagagacttgaacaggaagatgtacaagctactaagaagcacatgaagtagcacatgccatcatttttcatcaggaaaattcagatgaaaggtccattgagaactgactatccacccactagaatggctacaagttttaagagaaactgacaccactaaatattggtgaggcgctagaacaaccagaactctcatatactgctgctggaaatgcaggacaatttacctgcttcagaagactatagaagagcttcttctaaagtaaaacacacatcttttctatgatccagtaatcctactcctatttgtttatccaagagaaaggaaagcatgtgttcacaaaagaactcagacaagaattctcataaacattttattcatgcctaaaaactggaaacaacccaaatgtccaccaatacaacagataaacttttgtatattcatagagcggaatactactcactaatataaagaaatgaactatatgcaacattggtgaatgtctaaaatactgtgcagagtgaaagaagctacacacaagagagtatatacagtatgatttcacttgtatgaaattataaaacaagcaaaatgaatctatggtgtaaggaggccatgtaaagagaaagagaaggccagccagcccagtatcccagctgagcctaacctagattgcagaataatgagaaataataaaatgattgttgttttaagccactaggttttggagtgatctgttacacagcaatcaataatcagcatcattgctttcctcatggaattgtcagaagtatgtgatatgacacatatggaagggctctgtaagtggacaagtgctaagcacttgtgagcggcagttatctctgggcatatgtgcagattggggttagtgctcattagggatatgtccatttgagaattaacctgtggaattcagagggtcttactacccaaccaatataacctttggtttcttctatccctctccttcctcttgagcagccatccacaactgcttctggggaagagagagagagaaagagaaagaaagatgttcatggtttgttaaaaaaataaaagaaaataacatttacaaatggccagagtagaaaagatgtaccaatttcatttatcttgttaaggaatggggctagattgaagattagccaatgcttataatttttgaggctctaagaaatacctttgaagttagagaaggatggagagaagtgagagggagtcaccatggtctaaggggctggtcctcaatctggtccgtgacatgttgatcaggctcagggaaattaaattaaatgaaccaaattcccaagaaactgcttgatcaaccagaacgccagtttatccacttgcaatgagaaatgcaatttccaagccacagtatttggttctgtcaggtggtaaggagaagattaccctgggaaaccagattacttgacctggtaagagtttcatgtctggaaacatggggaagtgaggacatgcggagaatcatgagcaggtggagcactttgggcgtgctgagtaatgtcagtggactgttacacaaagcttaggtaacgcatctttcatgcacctggaatctgcaatctaacagatttctaaccaggctgagaggatgctctcagtcctgccagtttatggacttacagggatgtaaggaactcaagacagggaaatagcctctgtctccaaaaggatagcggagatgaggtcccttttttattttttaaaaaaacaatataatataattgatggattcagaccgttcacgagagactattacctccacgcccagctcaggcaccttctctagaatccctttcctaataatgtaagtgcccctgtcacctccatctatccatttttgttcttttaagcctattttatattatttgcttatatgccaaaccctaaacgatgagttcttgaaggttaaaattatgttttattcatcttttttcactagcccccgcatagtcgctggcatacataccgtggtgctcaataaatgcatgtggcattaactaaaagtttgctgtttctggaattcgtctgaaacctgaaacactgcaacaacatctcacttagaatgttgccttacccttttgccataattttagagtgaggaagtagaggtcactagattacgtgtccttttatgaagaacctacagctcagggcagaaaggcacttgccggaatcaccctgccagggaactctgaaccccgctgcgccgccgctcctgatctctggggtttcaggcgcctcctctcttacaaccctctcctggggaagtaaaccccatcaagacaccaccacatccttccccagcgactcagcctggggtcacaaaggcctttacgtcccactgaaaaacggttttctttcatttgtgcccattcgttcttgcagccccttccccagatcgaagactagggtcttagtaaggagaggtaaggagggaggggaagaacctgcctggccccccgcggagctctgcagggggcgtcgcggctgcacgccagcgcccgcaccaccccaggcgggaagggagttatcacacagggggtcgcacgcagatctcggggaccgtgggtgccacgaggtcaaactggcagagggagacgctgcagctgctgtaacagcaaggaaagccgaagcccccttaggggatactttacaaaattattttaatcaccgtgcaaacctaataacttgacccaagcgcaatcacctgtattcacccagagtaaatattcctaaaatcccgttcagtgtgtctgtgtctctcccgcctctttccgtttcaggcaaatgtctaccccccctctccccccaccgttaacacctctctgcagcgtgggaaacagtgcccagcagctcagtcctccgcttcccgctctgctttttgcatcccattcggacttataggaagtagttattttttggtggtggtggaaactgggcaagaaagaagacgctaagcttggccggggccaggagaaatattgagaagggtcgttaccttccatccgatctaaaccaatcatctcaaacttggctactctttggaaccacctggggagctttaaaaattatggacgccctgatagcaccgcagaggttctgatctaattgatctgggatgcggcctgggtatcgcgatttttttaaaactcctcaggttattcccagcttgaaaactatggatataaatttctcattcctcttcccacccagaccaaaaaaaaaaaaaaaaatctaagcctaagttgatggcccagggaatctggcacctgctcccctgcaaccagccagtgctgcaaggtccccgaaaatcggcgcgagcggcgacgctaaacacgcggcggcggggcgagcgggccaggcgggcggtgccgcgcgtggccccgcccccgcacgcctatgggcgcgaggtgcgggccctgacgtcactcttgtcagggccgcggcacatgggcggccggatgcgctgagcccggcgctgcggggccgcggagcgctggggagcagcggccgccggcgcggggaggggggtggggtgggacggcgcaccgcctccggtgctggcactaggggctggggtcggcgcggtgtcttctgcccttctgcagccgtcgacatttttttttctttctttttttcaattttgaacattttgcaaaacgaggggttcgaggcaggtgagagcatcctgcacgtcgccggggagcccgcgggcacttggcgcgctctcctgggaccgtctgcactggaaacccgaaagtttttttttaatatatatttttatgcagatgtatttataaagatataagtaatttttttcttcccttttctccaccgccttgagagcgagtacttttggcaaaggacggaggaaaagctcagcaacattttagggggcggttgtttctttcttatttctttttttaaggggaaaaaatttgagtgcatcgcgatggagaaaatgtcccgaccgctccccctgaatcccacctttatcccgcctccctacggcgtgctcaggtccctgctggagaacccgctgaagctcccccttcaccacgaagacggtgagcgctgccgcggccccgctccgggaagggacgacgctccgggggtccccctccgcggccgggcacgcccgctggagcatcccccaaccccgctcccgccctgtcccgcggcgccccggccccgcgctgatgaaattgaggagctcacccagcacccttcctccccttcctcctcctccatgaaaggggagggacccctcctgagctacatttaaaagagcttcgggcacccggcctccctgggtcccgctcctgcggcgcgggtgggaggtgtaacttgacaggtcaggatcgttccctagaacgaggcacacccgcacgcagagcgagcccgcctgcggagggcagagcctcccgggctggggaggagaaaccctggggcctggttctgtgcggggcagggggcgggggtcggcttgagggagggggtttcactgcgtagcctgggttttggggttgtgttacagcttctgttactggttagtatttggaactcacgaggtgtgagagaagactcgttttcttctggtgaagggtagctgagaaagcggggtgggggctggggccggtggggggagtggtctctcggcgggaagccgtgcacgcctccagcgttgacactttcccggtgcactttttctggtgggaggggagagcggagcaggctcacgtgtaaccgcgcaggagcctcctctggcttgagccctttcttggtaagtcccaaaccttcccaagacaaccttggccttagcagtagaggaggggtacgtgtgatgaggccccaaacccggctaagtgatgccacggatttgggttgatgcgatttcatgccttcggtatcacagtagcaaatgcgaaccgtgcggctcacagtgtaaagttctgaaaggttatttggctacaaatagcttgggagtacttgcaccttcttttctaggagaggacaacctgttgcattgcaagagtttgcaatctgcagatgatagccagggacccctccctaactatcctttaaggaagagcatttgggaggaaggggctgcctgcaggcttttgcatctgtgggtgttttaagtcagattttcagatgagatggtagagggttagaatggatggcagtggaggctgtgtttctctgaagatgaaactcagaagcaaattccttaatcccagattccacccacgactgaatactagaattggcaagatccggaatgcttgttaaagacctaatgggcgagcagtacttccaggtagcaaatagctgcatacttccaacataaatgtatagaataactcaccttttccaatagctctgcttttgaaaggttttgtaaatgcatactctttgtaaattggatcatactcaaatgtttggagaagagaaggaagaaaacactttgtatttttttaaactccttttgtaaaaatcagtgtgccccagtggctttagaagcaaacacatgtgagctcagaaagttctcattctctgccaacatgaggcattggtcaagttccctcaagtctcagagcctccgagtctttgttgtaaatggaggtaattgttattttgcaagtttattgtgagatttttgagataatatatggaaagaaccaggtatccagtaggtactctaaacatgatgttaaagaagggtggaaggtccctgctttaccaaaattaagaccactaactcactggctttgtaagtctgaatgacctcctattgctgctgtgatgaattcctggaagataattcaagcctggttattggctgttgttttcttaaaaatgacagcagttgtatataatcacagatgttatattcctattttaggtttaagttattactcttctcaaataatgtgctgagactgttctctggtttttatcctagatcagcctgtagccctgccccaaggactagtgccttctttccaaagtaaataggaagatgttgaaaaacaggcagagatccacgtcctgcctgaacttttaactctagatctacaaaagacagcagccagagaaggaccctgccattcgtgagaaatagtcttataacaggccaggaaaagtgataaaagagcggtattgtttttcttttctttctttttttttaagtccagctttcccttcttctgcagcatttagtaaagataaagacaaggaaaagaagctggatgatgagagtaacagcccgacggtcccccagtcggcattcctggggcctaccttatgggacaaaacccttccctatgacggagatactttccagttggaatacatggacctggaggagtttttgtcagaaaatggcattccccccagcccatctcagcatgaccacagccctcaccctcctgggctgcagccagcttcctcggctgccccctcggtcatggacctcagcagccgggcctctgcaccccttcaccctggcatcccatctccgaactgtatgcagagccccatcagaccaggtaagtgccctgaagattctcccttcagaaagggaggaggagggtgaatgggacaggcaaggtagagttagcataaacatcttaacactcaggttttagcaaagatcctaagagaggtaccttcttctgctccactcctggcagaggctctcccactttaatgagcatccatatcactcatctggagagtccggtaaatacagactctttgtatctacccctagaaattctgattttgcaagtctggaatgagggcccaggaatatgcattttaaccagctcccccatgggattctaatgcagctgatccaagggctgcagtttaagaaataacttacagttaatgatttggataatttaagcctccatcgcatcttgtatctcttttcctcattccctaaacacgtagataacaggtagactctcaatagggtttggtttacctatattcactcttgtctgtcctgaaggaaaaaaaatgtgagtagggatatggggcaggtatttttttttccatccttttcatcttgttttgtcattagctgagaagtagaatctaaaagcaggctctcatattgtgtttctgagccttcttcaggaccagactccatctctctcgttgctattcccataaacccaactgttcttatctttttttttttttcattttcatctgtctatcacactcagtccacctgtatcaaagcccacaaggctgcaaggtcagctgtaaatgatcttgaaatagtacacaaaaatatcacctgaaatgaccagtacttcaaaacccactgctaatgctcagatataaacacagattgaaggagctttgaattcatgcctttagcaccctgtagtaccaaatgaacaggaagaaagacgatttcatgtgcacaggtaaccaggaacaaagattcagccagataaatcatccggaaggtcacagagctgagggccttagctgtgggggaagacagaaagcaggacaatgcgaaacttgtgctagagattgttactgaactccgtgtcctcgactcttgtagaaatttctgtggcacatggagcaagatttaaatggaaggaaatgatgtaaaggaggaagagaatacccctgcctcgatatattcatattgaagttcctcctttcagacctctgtgtgctggccccttctccaaaattcactttgaattataactcaaggccactggctggaatggaattaattcttagcctccagccacccctggaggctgtgggagcttgggaaaacatgcctttatgtgatcctgatcccctgctacttagaatgtgcggtaccactatcttcaatttttttgtaggaacaagcaacaaaatgaataacccttcaaagtgggaaaacagccaggagagaagggaacagagccccagtgagagacacagttatgcctcggtcattgtgctctgtagactgagaatcaccactttgtagctgtgtgaccttagaaagcaacatcatttcttggagcctcagtttccttttttgtagaaggatacaatttctatttgattgagttattgtgaaaattagagataatacgtataaagggtcaactgattagcaatgagtcttctatttgtggaagcaattgtgatcattgttgtatgtgtcaacttttattacttatttcaatccctgtcttctgaaatatcttcgtaaggtaactaggtactgtatataacccttcctctggagagaaatgtcaggagattttgcccagtagttactggattggggtattttgaccaacacttgtaatcaactgacaagtatttcttagtcccctaccaaatttaggatgtgtaccatgttaggaatactatattttttcccaggagacctgcacatattgggtgttcacaccttggttcctactgagagtcaaaaattggggttttgggatttgaagcagcttgaaaactcatttgtcagagctcattagagtcagtattgatcagtgactctcagaaggcttggaatgcccaatcagagttgcaatgcatagcaaagaactcctgagtttcaggggatgtcattttgtaaggttctggtggaaagacactgggatcaaagggaacactgagggtctagaaataagttctccatttaaatgtcttattttaaataatggaaacacacttcaacatagtttccttcttggagttgaaaactcgatagtcctcatagaaaaggaaaaaagttaaacctcgtcttcaaataccaaactcaggtaaaataacactctgctgttcatagattgttgatcattataaagatgcaaaataaaattctaagagatgttggcctgatggatggatattgcaagcaaacctgaaaaaggagaaagttcttgattattctgtgtggctcacaggagtgaccagaatagaagtaccaagttaatcttgaggaaaataagtcctcagaagggaagagcacagatgtagccttggtcattctgggagctgtataatttcagtcttgattggtgtttctcaaccttggcactgttaatgttttgggtaaatcttttttttttttttttttttttgagacggagtctcgctctgtcgcccaggctggagtgcagtggcgcgatctcagctcactgcaagctccgcctcccgggttcacgccattctcctgtctcagcctcccgtgtagcgccaccacgcccggctaatttttgtatttttagtagagacggggtttcaccgttttagccgggatggtctcgatcgcctgacctcgtgatccgcccgcctcggcctcccaaagtgctggaattacaggcgtgagccaccgcgcccggccttgggtaaatcttgtgtcttacgctttataggatgcttagcagcatcgcggcccctacctcctagttgcaagtaggacccccagtgccccagatgtgacaagtaaaaatgtcttcagtcactaccaaatgtcccctgggcataatacagtcactcccggtggagaaccactggtctagaacttcaatttggacagcaaaatctggacttactttaggaccctgtcacacgcatggataaactacctgcaatgctttatggcaaaacttttaagaaggtcaggggacattgggttgccaagaagaaatagaatattaataagagcataattatacactttagttaataaaactaagccatcaggctaatcaggagataattgcagagtagtttaccaaacaattgtttttggctattcactcagcatgcatcttttgagctatgctccgttgtggtgttagtgcttcttgtttggttgaagggcaatgaaaccatgagctgataaagtatgcatttctaggtctaccccaaggatgtcttggaatgacaaggtgagcattcttgtgaatatttatttatttatttacttatttgtttatttatttttgagatggagtctagctccatcacccaggctggagtgcagtgacacaatcttggctcgctgcaacctccacctccggggtccaagctattttcctgcttcagcctctctagtagctgggattacaggcattcaccaccatgcccggctaatttttgtatttttagtagagacggggtttcaccatgttggccaggctggtctcaaactcttgacctcaagtgatccgcaccccctcggcctcccaaagtgctgggattacaggcgtgagccaccacaacctggcccatttttgtgaattctcatactatttaccatgactgccccaacccctttcttatcttgagcaccccatccctattcctctaactgtctgatcaaagaatgaatcaaatatctgaagaaatccagttttctttcaagaaacaatccagggattcattaaaacctgttgtggctattgtgggatcaccaagctttctgggctgacatcttaatgaagggaagagtagtggttcttggaggccagagctaactgcaggggctcctcggtcatccaaggtgcagtgtcctgaatgttcctaggccagcagagatgacaggagtcattctgatgacttcaatgtttgcattttagatactgtcagaggtgggatgtgggggtgctctcctggagggacgaatatgtgctgggtactggaaaaagaagaatctgtttgccatgagaattgagcgattgctttaaggacagccatccctttagggaaagtcatctatagcagacaaaggcagagttatttttatattacatgcttgtaaagccagatttgaaattatttcctctggtggtttttctttgaatagctggggggtgtcctaccactgttaggcccatattccgctgagaattaagaaggctgtctttctagttctgagcacggagactgggttatgatgaaggctggttacagagtaaagtgaaaacccttccatgtggttgtgtgtgggaaaaggatggcataagtgggtggcacaaaaggagcgggggtgggggagaacccattgtacctttgcaatatggagtttgtattctgtttctgccgaccttccttgtgagaaggtttgggtatggaaggaaaacgctggcctgggaatctgagtaatgatggagggaagttctgtgcaggtgattctgggtttatggaaggtcagaggattctcttacttttcccaatattatgaggtgaagctccgcttaagggcgtgcagttcgtgtatctttccagtccagcagactgataatgtctgcaggttgggagcgccatgactgatagtagctgtgcccggtgtctcaagcatcttggaagtgctgttcattcatcaggggctaggagatcctgaaggggagggagtctgcatggttctggagacaggtagacatttttctgtttcttgtagagtttatcttctccacggatccctgtagaggacaggcttgctgacattcacaggatagtagtcccaagcctgtggcaaaaggtatttttgggtatgtctggaaagcaaggcaacttggtggttaggattgtaggctctgggctcaggggcttgggtttacatcctggacccacccctggcttgccgtgtaactttgtgtcaatttcttaaccctttaagcctcagtttactcgtcaatacaatggaaattataaatggtccctctcccttggggttttggcagggttaaataagatcgcatgtgacaagtctggccagtgtgtattgcacgagtactgggtgcattcagctgttatggtgtcagtggcatgaggtacagaaaggaatgactggattcccaatccctgttttctatttagggatttatttatccagtccccttccctctgcaaaaataggacatgctttcatgcattttttttctttcccatcatgtccaacacttacagcctgacctttctcttccttctgggttgggacgaatcggttccctgatgttaaccccgcagcatggcttctgggttaccaactcctgttttgccaatgtggaaacagccactgtctgggtgcccagtcccccagctctcgtgtgagccctggcaaccctggctgcctgcctgcatgaccgtgtgctccaggcacgtggctgtgccctgtggagcttgcccaacgctgtgtggtgtgctggcttgcttttttttttttttttccctcctccccctcgcttcccttcccaggagaatgacagcaagtgccagcaagcaattgtaatcctgaccctggcatgagaaagctgagctctggagggcagttcagatgccagggaaacctgttctgtccaacattctagccagaccccaaacctggccctctctcctgcctgtctgcccagaggccctgtcttctctgcactgctgcggtgggcaggattcctggaggccagctcctgccaagggtcttggcagagtctttccagttcagcactgtgcctaccagactagaaaaatagcaatataaagacagaattaggtggaggagaaggaaagggggtgggggaggtgggaagaaaaaaacccttgataacatcctaatgtagaaagccagaggaggggaagacagccgtgatttattaggtttctcagaaacctctcttccaattagcactaatcacttttacccaggaatcattttttatgtctcagcaatgaaaatggaggtaagagggaaggtagtagagaaagtaataagatgaaaaaaagtagaaaataacatattagagaggtacagggcctgtgtttgattctgtaatgggtgtgggtgagaatattggtcacagctaatattgattatagtatttggccctcccccagcaaatgtcttgtcctaaagctactaaaccactgtttttctataaatttaaatttccctcagacttaggtgcctctgtctcaccatgcacaatgtctgtcagaatgtcctgtgtttgagacaccagtctatacgggcaatatagcagtaatgttttttagagcacagaattgaataaacaaaacagcctgagtgtgaatcctgactttgccactcattagctgctcacgatctcaggcaagtcatttaaatgctctgagctttcagtttctcatccggaactttggaataatcattggacctgcctcataggactgttgaaggtcatatgagccaatgcatgcagagtaattgtcacagtgcctcgcacacagcaagtgcttaataacagctgctgcaagcagcaccttcaccaccatctaatctcatttcccatgggaggaccaagcgtggggctcagaaagagtcttgatacttttcccttcctagctaattaagaacactggtcaagaaatttggatttctctcctgcttctctgccaagtcttgcttgcccttctcttagcctttgaattttaggtgaccttgagtagctaactgtaccctttactcattcttcctggctcatgggattaaataaacaaaatgcattttgaagaagtttttttgtttgtttgttttttgagacagggtcatgctctgtggcccaggctagagagcagtggcgcgatcatggttcaccacaacctcaacctcccaggctcaatagatcctcccacctcagcctcccaagtagctgggactacaggcatgcaccaccacacctggctaatttttgtattttctatagatacagggttttgttatgtttcccaggctggtcttgagctcctgagctcaagcaatccaccgaccttggcctcccaaagtgctgggattacaggtggaaaccactgtgccctgcccaaagaagttcttgattagatttcttccatgtcatatttgctaatagatcagtcagttactgctaccattgaatttttaacaatagacattaataattatatttaaaggcaatatagtgaccttgggggtaaggaaaccataaaggtatgttatggtgtttcagaaggagaaggttcagtttatcctccggcttgcaagcaagactttacataagcattccagaataataattcctcctctccccaaggggttctttaatgagtaaatccttaatctttctgaaccttgattgtctcttctgcaaagcaacatccttgttgggtttttgtgagctttctaaagctactgtgcaagaaagatccagcttggtgccctgtacatagtagccaagcctttaccataagtcagttcagttacttttctctaagaaatgataccatgattagaaaacaacagaggactttgggaggctgatgtgggaggattacttgaaaccaggagtttgagagcagcctgggcaacatagcaagacccatctctacaaaatatttttttaaaaatattagctggatatggtggcacgtgcctgtagtcttggctacttgggaggctgaggcaagaggatcgcctgagcccaggagttcgaggctgcagtgagccttgattgcatcattacactccagcctgggtaacagagtgcaaccctgtatctaaaattaaaaattaaagagaaagcaacagaggaggttttaggaggcgaagagcaaggtgtatggtcccagaaatagcatctgtttttgctctgtgctttggtgttttgatttgtgcaccctgaggaagagagacaagagtacaatttggctgctagtttcaagagacagtgatttagtagggaagataagacttttaggcaaagtgatgagtgacaggacaaactagcatgttctcagtgtcaaatgacgggtatatagaggcctccaatatctgctgaaaagaggaggttgaaagattaatcaagaaaatgaatataaataagggagcagtatagccaataagagctgccagacctcacaggaagaagcctttgctcaaggcaaaggtgcctggggcgaggcttcttggaagagttgtagcctgtgatgggcccggaaggaggggtgagagagccagattggagaggttaatgccccacaaagttatagaggcaggaatgcccacagggtgttttaggcaacagggtgtagatccaatttggctggtgcagaaaattcatatgaaggagtcagggagatgagtcagagaggttggtgccagtcaggctgacaacttcatgagtaccaggctgcagagcttgaactttatccagtaggcaatagggagccattgaaggtttttcagcaggaaagtgcatgtgaacatttccacttgagttcaaggttggatttgaaacatttttagaaacttgacaatagtttcctctggcaagccaggatttccttatttttattattttgaaaataaatactctcccttgaacatcaaacagcttttcaaaacacgatgttctaatgatctagagaaagtaattcaaaaacacagggtttaggtttcatttataaaacccataattttggtgattgggggaaacactctttggcaaggaaatagtttgagggatttgactggttcagaatttaaaagtccaaaagcaggcctggtctcataggagtagaaaaatagattttaataaacccaactcattaacgttcatcacttttaaatgcctctattttatacagcttactaggtttgcaaataagtatattgaaccagatgttatgtgtatgtgtgtgtgtgtgtgtgtgtgtgtgtgtgtgtgcgcgcgcatgtgtacgtgggcatgcgtgcatttgggtttgtgggtgggggtgggaaggttaatgtctcagtgatacaaatagtacctgattgtaaggattacctggggcagtaatatcaagctaaaaatacttagccaagtttctggctagcttaaatcagttttactcctgggaaacaaaggagtcattattacagttttgcattcttgagtcctgaccttgtatttgtggctcccttcttccctgaaaacagaactgtacatcatgcttagatatgggatgtgtgtgtgtgtgtttcatattgggagtactagtaaaggaaagggacattgtgggaggggatcggattggggggggttggactgctgaatgtcaagtgcatgaaatgacttgctcaagcaccccctgaagtgtgctctgatatcaagccaagatttcagaaggctgaaagagttgccataacccaatctagttcacttaaatagaaaatagctgtcaaggtgggcaatttcacctccagctacatagagtagacaattacaggagtgttggcagaatcgagtgtctgctgggggagaaactatagtatttgtttctgttaaattggcttgtggtgggtacagactccatgaccgaatgtggaaattcctaaaatgttggttttccttcttttctgacttttacaaactaatgttactctcttaactcactacccatccaatctcattttctttcctgaaaaactacacagctcccctgtcacacagggttcgtaaaagtttcgtttttagaagtttaatctgggatttgtttccttaatgatctttggaagaatgctttggaatttgaggtcttataatgagacatggcttgtggctattaaaccctgttgcctctcaaattttgcctgggagaccctagattcctaaaaacaatgagtgcatgctacagaaagatgcttcagggagctacaacactaaatcatctgtgacaaaatgttctcttagaaagtggaattgcataaatggatcagcagaaataaatgctttggcagaaattccttgagtggggaagagcaatgctttcttttctaattagctctgggtaacagtctgctgtggtgtctttgctgtggaacccaggcatggacagtagagcaggaaagtctcatcactgctctctaagtgcttctgcacttaatggaaagagttaagcacgcctgtccatttgtacccaataaatgcctcttgaattgatttgagtggcgaaggtttgtttgggggaaggatgccaccaggccctgaccaatgggaatcaatgcagcaaaccagatgaacaagatcatctagatatgcagtaatcagattacccagaacagaaatctcaataccccaagatatgaggggttattttaaggatagtggcaaacagttaaactcagcctgccctgaggattgagcagaagactgaattcaccttagtcattatgatgtgggctgagttagtaacactgaaggagaccatgcaggcttttactagagaactatgaaaacaggacagagatctcagatccaattagtactggatcaaaatagtattgtttttaaaaggccaaaggccattgaaagatttatagaggaaagagtaagtaatataaaatgtaaagatggaaataaagccttgaaagagttcctgaagacaagaagagagaaatttgcagaactgaccttgtaagaatttcataaaattcatttcattatgattgatttctttgtattagtacaccttcctggggaagtgagtatcttttttcctcataaaatctaaagcatgtttatttcaaatgggcagtgacaactaaatgatttaaaaataatatttatattcatgtcaaaaaagttatttttaacattataagtgaaatttacccaaacatagtaggccagataatgatatttagttattggcttcctggaagactgatgacaggaagattcagtattacacaaactaggtataaagaagcaatttaggtctacttattttatttctcctttgaacctctcacttgcctgacagtagcattgcattgattgagattttatgatcattttatcttgaattggttaaactaaaatttatatctttgtcttctttataaagaaagatattactagctgggcacagtggctcacacctgtaatcccagtgctttgggtggccaaggtgggaagatcacttgaggccaagagttcaagaccaacctgggtaaccgagtgagaccccatctctacattatatatatatatttttaatttaaaaagaaaaaatattaccaaacagattaattatgcaaacataattttgggacacagagttaacttgaggacaaaatagtttttaaagattttaactgtgtatatataaattaatatcctgaaccacaagtgcgtattagtgaatagcaaaagaatttttttcattctgacatttcagtaattcagattagcattcccaccaaattgttgccagttatctccatctgtccccttctccattcccccccaccactcaattttcatatctttaaaattaaattttcatataagtatatggaaccaaaatattattttcattcatttacctgccaccagagaggatgtcatcggccaacccgcaaaggtggtgggatctaccagccatataactcttctgcatttgttccctccattgtaagtgagggtgctgatacctgcttcagaggattcctggagaagtaaatgagatgatacatgtacagcacttagaacagtgctcagtatataaatggcagctttcagcagttttatttttattctacaattactattccttctcttcttccacctccatggctattttatggacacttaagtaggaacacatcttgtgttacagcaatgctatagcagtgatggcctggaaactgcttttgagttattgcagggaagaaaggatcaggaagagatacagcaggtgagcaccctgtgtttttacacctgtgagaagatacatcccacctcaaacaccatttgtggtcctatcaccctagcatgtcacagtgtaattgcctgctttcttggatagctctttgaatagatgtatgctctgtgagccctggctgtgtcttccatctccatatgccctgctgtgcctgcatatgtcttctggtgctatgcctggaagatcttgagtgggtaagggtgaaagggaatttagaatacatttcctttggtgctctagagcctttccaacatactgccagatttgtgttttaggtttcttctttttacccttggtgacacttctgggccataaagtagtgaactggctgtcctctagttgttgttgatgggctcttgagtgatgtggaggcaggataatgggttttcaatggtcacaaaactccctggccttctgctctccttagtgtgagtctctcaaatacataattcttaactctcctttctctgtaccagagggaaacgtggcagagaggggtccagataggaaagaatggactcttctgctgaagtgaaatggaaatacaaggaaattgtaaaaacaaaaatagattatttggaagaaatgtctaaaaacggtttttacacaaaggggacaactagaagttgatcgatttaagaattgagattaacctggtatgactttggtttccagctagattacagctgtggggttcttggcccttggcatgggtcacgcttgatacagtatgttgtgcactgtacatgtggatgtggcagggtaaggcttttaaaggtacagcagtcttgagggattacaaagtacatcagcatgaaactaggcaagattttagcctcttgtgagggatgttgaatttcagctaaagctccctcagcatatttttgtatcccatcaaatatctctgagtcgcggccaggcgcagtggctcatgcctgtaatcccagcattttgggaggctgaggagggtggatcacttgaggtcaggagctcgagaccagcctgaccaacatggtgaaaccccgtctctacgaaaaatacaaaattagccaggcgtggtagcaggtccctgtaatcccagatactcaggaggctgaggcaggagaatcgcttaaacccgggaggcggagattgcagtgagccaagatcgtgccattgcgctccagcctgggcaacaagagcaaaactccatctcaaacaaaacaaacaaaacaaaaaatatctctgagtctgtctccccttttataaaagagtgaacacaatgctcctaagtttaaatcagataaattcagtatgaaatcatagcaatagccattatgtgttaaaaccagcattgtcctaaacactgactgtaagtagttgtagcaaatcaactcatattagaaatgatattggtccctggaatttagtctgttcccaagaggactgaatgttgtgaatacattgccaaagtatgttttctttttttctccatcagcccttccattctgactacaggcagcttaaaaataaatttgggcatatctcagtggccaaaaaccatggagatcaggatgaaatcattttcaaggcagaaataacaggcgttgataaagatattcagagaaacacagtcctaatagcatcggcacgtgattgtggggccctttagtcaccaagctaaattgaatttggaatcaggggtctactgaaaagccaggaaacttttgagcaagtcacttgaattctgagcccccatttcctcatccagaacatgatggcctattttgcaggattgtcatgcaagttaaattacattaaacaagctatcagtaaaaaggatgtgggactgtgcctactcggattgtcacccagtgagttttaattcggagtccgaatctggtatttaaaggccacgttctaaaatgcacttgtagttaatatctttggagtcttgcttccaggtttttgagttgctggactgggtctttgtaagctccgtgatgctgctttgggaacacaagagatctaatctgtagtcctggctatgctattaattgcaagtataaccttaggtgttcagcttctctggcttttacttcttcatctgtaaaatgggaataatctacgtccttctaacttacaagtatgtcataatagaaaactgaccaaacagtttacatcaatgtccattattatttccattggcttttaggcggcaagagatggaaaacacgtagcaacaatttcaaaggtaggccagttccaaagagcactgaacttggagtcagccaatctaggttctaaagccagtttgtcagcattagatgtctctggacaggacaggtcaccaaatctctcaaagcctaatttttcttgtctataaaatgtaggtgctgtttctagctctacgactctgtgttcaaagactactatgtgctggaagacgactaacattcacattttggtgaatgtctaaaaaaatttaaagcctcttgggggtaatggagctgctcccaagccaagtagtagatggattaagaatctgacattcttccactcataaaggatgacagagtttaaaaactaacgctgaaaagcaaaaaacatttgacaccttttggaataaaaaaatcaacaataatcaagctagttacttccttaaaaaatggtcttcatgccgaatggaaaccaccagattctctctggtgttcagcattccagaacaaccctgaaaataaattatctggctggaatcattgctccaacggttggatttcttagtggtcgtttactagccagacaaaataatttttttataaagaaaagaaaaaaaaaaggaaagcccacagaaggaaacaccccagggcccactgctggctcttttgatggcaacttttctaggaggacagtggccagagggggcctttggctgctcctctaggtggctggagtcaggtttgtaggacctgcctgtgatagtaggtttcatcttgcaactggctctgatggattagtaggtgcctgagaagtcattttgaaagggtctgaggctcggtctgggctcagtgaagagttctgtgattaattagtgatgtctgcccttggcttgggtggggcagtactggtgcctggtgtttgctgtcctgccagagcaggtttggaagatcctttagtagttgtccttctactgggcagcagatcaaggactcaggccggtgttgcttccgatgtcctggaaaagtgttttctgagcctccagcacataatgttttactctctgaaggaggcttattctgattagcttaacagagggtatggaagaaaggaagtctattgattcagctccttggtcacgagacaggaattgcaaggtggagggaagctgtaattccaacacgtaagtccatggatactccagtaaagcacaggcataggtgccactgatccagcagaggcagccacaaaccacaggccctggtaagctgcctgtggccagaggtcatggctgcagattccagggaaactgcgtcctcggtaggcagtcagccgtacactccatacttgcgattcttgatatttgaaatcaaaatcaaagtgcagccactttctttaaggaagctttggagaacttgccagtctgtttaggattgaaggtgattctcagttatccatgctaaaggaacagataatctgaagtttatttctcctcagctgtggaacgtgctttgcgtttttgtgctgttgatctgctttcctggtaaggtttgaactcttcagatttttctttctataaagaacggttgagggggagtgtagtgctttttgcagctcccccagtatgtttctaacatagccagccaaatgtctctgagcccttccagcctcctaactttaaatccatgaactgcaccagggaaataatcaaccagttgcaatttgttgagcacttactgtgtgctccctgggatccaggtaactgtgtgacaaggacttgatccaagagtgtgttgggcaatagggtgaagtgggctccaggttaaacattggctatagggatttacaaaagagttcactgagagtgggcctgacttcctctgctactgctgtttcctgttgtttccagtaactgcacttgagctctgcatacggttaactttcaattatcctgaggctgattaactggtttgcagattaaccaaggtgaaggctcacctgggcctgggagtcgctcatcaactcagctgctccataattagctggtgatggctgattgcctgccccatggttgggaagcctgggcactgggcgactgcaggggagggggaccaagggatgacttcttccaggaccttctactctctccaaccagaggtgccctctagccctgtaaacttctgcattctccagcacagttcctgagaggttcagaagttacctgggtcctggtgctctgctcctgctacctttcagctcctgcccccaacaccctgttcaaattgggaacaagttgaccacagggcacagtgaatttgaaagtccggagattaagtcatatgttgaaagagggcccagtgagcaggggccactaatcccctttcttcctcaacctaggaacctcctcccttcccaagatatagatatatatagattgagaccctgagcaatggatctcttttgaggccagtggagaccaagaccactgaagcaaggagtcagggactgcccacaacagcaaagctccccagagtccaggccaccccatggtgattgtttgggttccctgtgattgcctcccatggctgccctcgttcatagagagttgactgcatttgcctgggtccctgtggggtgagagtatggaagtatgtgtattagtcacaccttacaccagaccagaagatatacagtttaacctaggagtcaagctcctgctatatttggaatggtctcagttttgagacgtggtaccttggatcccaggtatatccaaagtcttgagagtgtccattgaggactttggtctgtagccaccaagaaagagtaaacatttgtgcaggatcatgtttgatgggattccatggattgttttcatttcttaagcagcattcccctgagcctttgacatgtctttccatctctggctgtgttctcacttgcatttgccaggcctgcaatgcctctgccttgatacaacacagtgtgccagcagctgcagtcccttttcagccagggccatgggtttccttgggtccttctctctggctcacgttttccagggctgttggtgtgtacagtctagagatcacattttattaacacaaagaaatctgcttgggctgcctggctcttgcagtcacgtggagagaaatgtgttcctttggtccttcagcctgcagcactctgtgcaaaatacagcagagagctgggcactgggccaagcttacatttcacttcggaacacactttcgcatcactccttggcagaacatccacggtggtgtctatttggggagtaagttagagaagtgttgtttgcctcttatgagtgtcgagagataggacctttagaaaatgttttacttttgcgcctgtcttcatcttcttcgcggtgcccaggtactgaggtgatccagctaaatgtggcagtgatgcctgagagaagccccttccttcctcgggccacccttttctcttgcaaaatcagtaaacagagccaggactgcctgggacagggaaacttaggccaaggtaataacatcaaaaccaaagtcctggaactcttgagtaagctagttaccctcccagataaaacaactttgttgtccaaatcttctttccaaagatctaagacctttctaatgttggtccaaggccagccatggaaggaaggaacttcagcaagccgcctggaatggcaaacactgttaaaataaacaaatggacctttgccatttggttttccctgacttgtctatttttatttcttttctccccccacccttgtactttacctctcgatagtacccccctttctccacccctactcccattctcatctcacttttctcaggggccaagctggctgttttgccttcagtaaaacaaatatctaatttcaaaaagaggaattaggagaaagaggtggtataattcatttcttggggtaatctcgcttccctcagctcctctattgtctgttcttgtaggtggccacctgaagcttgacttgcttttgaaaataaagttggttttggaattttaaaccttccttaggaaagacttgaatggttagaaaacaaagatttattggaataataatgacgtttcttttctcaatgaaatagacccctctcataacaaacggttgaaaataaactctttttccccatcacaccaagccataaattccataaggatttcccagcgccaagccttattcagagtcttatatttactgctttggaatgttacttttgccatcagtatcatccagccaagcaacaaccaatcaagacttacagaaacttttccagctagatgcatgtgccaggctgcttcttccttccatgatggaaggcctcccttgtcatagaggatgcccaaaatctcagggactgggatacagcctcctgccagtctgtgggtacagtctttgcttactctgcagaagggaggtgacagaaacccattccacctgtctcagaaacctgctggtaattaactttaaaaataatgccaagttctcacgtggctggtagatgcattagctcaatcaggggggaggcaggggagaagcatgctgcttcaaagagtaatactgttgcaatcacattagtcattccaggggaggttagataaggttattgaaaaggtgaagtcaccctgtacattgaaagaggtcttctgaaagtgttgagaaatagttgaagttcagaagttttatttggagctttgctcccccttccccttgtaaataagaccagtattttttaaaagccacattttctttgtttgatcgatgaacactctcatagttgatgattgagagtcatctacagccagtatcaagggtcagttctgcattactcatgtgtagattatctctttggtatactagccatggtcactgtgtaagccctggccagttgccacccagcataacaacaccataaggcatctaccccctgcctgcacttgggaagtgttcagggaatgtaatttcattttataattaagtgaaacaatgcacagtgcatttccttggtggattctaacagcaggacagttattattcagaaaggactgtgtctggactactttgagaatcagtagtttaagttgttgcacctgtgtttggcctatcctcataccagtgtaaatacttcaatcctgcaagattttctcattttgcataaaacaggtgaaggtttgttgaagtccatcttccaaactcccaaagtactctggataccttggtaggtccttgtggactccctgttgttgacttgcaagtttcccagaggtggggactggcttttatctccagcacctaggcagctgctttgtaccagagttgatatacaggaaacatttgttgagtgaatgaagtaacaaagatactaatttcattagaaatggtttgaaatgagtgcttgtgttggcagaattttgtccaacatggttggtctttgcaaagggttatgatagtatgatgcacgcctttgggccagatgtgagtcaggatggtcttggaggaggcgaagtgcagatatacccctgctgataggctcctcataatacttcagtgagctgtttttctcgtgactgtttcactattttctttttttcttttttctttttcttttgagatggagtcttactctttcacccaggctggagtgcagtggcgcaatctcagctcatggtaacctctgcctcctgggcccaagtgattctcctgcctcagcctcccgagtagctgggattacaggcatgcaccaccatgcccagctaatttttgtatttttagtagagagggagtttcaccatggtggccagggtggtctctaactcctgacctcaagtgatccgccctccttggcttcccaaagtgctgggattgcaggtgtgagccaccacgcccggccagtttcactgttttctgattggtaaacattcaaggctggatgccatggctcacgcctataatcccggcactttgggaggccaaggcaggtggatcacttgagctcaggagtttgagaccagcctgggcaatgtaatgaaaccccatctctaccaaaaacagaaaaaaattagccaggtgtggtgtggtgtcccaactactagggaggctgaagtgggaggatcgcttgagcccaggaggcagaggttgcagtgagctgagattgcgccactgtactccagcctgggcaacagaaccacaccctgtctcaaaaaaaaaaaaagttaaattaaaaaaaatattcaagaatgaagagtgttttcagagaagaggatttagatgcttacaaataaaagtggatattgaccccccaattttccaccctttaatcacagagacatgattggaagtcagcagctccagcctgcatgttcccagatcacctgtaagagttcttaaaactcatcccacaggttcttaattgggatttttaactgggtaagtagagaagctccatgttgggtgtggggaagggaggatgcagatggatataaatttttttaaaaaaacatcaacttatgtttctttggttaatagatgcaggagaatgcctcttctctccatgtggcatgtcagggtatagcttctttgagcacaggatttggtttacagaatggcatgtctccccatgccagccagtgataaggggcactaaaacagacttggccttgctaaaggcttccaagcaccaggccatgagcagttgaccccaccacagaggtatgtacagctggcaggaagctgcccttctggttcactgactcaagagttggagcagattgatccctggatttgcagtgccctcaatatcgctgcacagaattcattctatgtaccccaggccctatgtgcccacagcaggaaatatagtgtgagcctctggcaatatccagagttgcttgagcctcctcacatttgcttctcctattcagtttagtgtgcctcagtttactaatatgctggggaaaataacacccctcttgccaaggtgagatagcagagttctctgcataaaatagtgcataaaattattcctatgacaaggcatttgaaaaattactttgagaatgacttaaaatacagaacaatttttttaaatgtggcaaacatccttattcttatcacccagaattaacaattcagtacagttgccatatattcatatataaatttacctatatattcatatgtgaatctagacattgcagattcacttgggggtctcagggaactttttataaaaagaaatgcatttagttcgtaaggcctgattgagataattccaagtctgttttctcagctcttaatccttcctagcactttgcattcattgtattaataaataagcctgttttcagcctagttagaaaaaaaaaggccagcctcattcattagaattctgcgttccctttggttattctttgttggagagaagggggctcactggtacagaattccaagatatttcgctttggaatgtgaaaggagtctctcttgacaacccaaggagaacctgcctcagaatgatctttcttcctcagtgctggaaaatgaaaaccagacaaataagcacaaccaacattaacagaaggccttggtacagcctcaagaattaaagtgctgtactctatggaaaacagtgtggaggttcctcagaaaactagaaatagatctaccatatgacccagcagtgccactgctgggtgtacagctgtacttcgttttatcggacttcaccatattacactttgccgatagtgtgtttattaaaaattgaaggtttgtggtaaccctgcattgcacaagccttttggcactatttttccaacagtatgtgttcacttggtgtctctgtcatattgtggtggttctagcaatatttcaagtttttcattattattatatgtgctatgttgatctatgatcagtgatctttgatgttactattgttattgtttgggggcaccatgagccacacccatataagatggtgaacttcataaatgttacgtatgttcttctgactgcttcaccaactggccgttctcccatttctctccctctccttgggattcctgttccctgagacacaacaatattgaaagtaggccaattaataaccctataatggcctctaagcactcaagtgaacagaagagtcgcaggtctctcactttaagtcaaaagctagaaatgagtaagcttaattttgaaggtaggtcgaaagccaagacaggccaaaagctaggcttcttgagccaaacagttagctgcattgtgaatgcaaaggaaaagttcttgaaggaaattcaaagcactactccagtgaacacacaaatgattagaaagtgaaacagccgtattgctgatatgaagaaagtttgagtgtcctggatagaagattaaaccatccacaacattcccttaagccaaagcctaatccagagccagggcctaactctcttcaattctgtgaaggctgagagaggtaaggaagctacagaagaaaggtttgagctagcagaggttggttcatgaggtttaaggaaagaagccatctctataacaaaaaggtgcaaggtgaagcaccaagaaatgatgtagacactgcagcaaattttccaaaagatctagctaagatcattgatgaaggtggctatactaaacaacagagtttcaatatagactacacagccttatattggaagaagacaccatgtaaaagttatagctggagataaatccatgcctggcatcgaaggacaggctgacttttgttagtgggcaatgtagtgggtgactttaagttgaagccagtgctcattcactgttccaaaaatcctagggtctttgagaattatactaaatctactcttcctgtgctctgtaaatggaacagcaaagcctggataacagcacatctgtttacagcatggtttgctgaatattttgagcccactgttaagacctactgctcaggaaaaaaaatcctttcaaaatattactgcttattggcagtgtacctgttatccaaaaactctgatggagatgtacaagaagattaatgttattttcatgcctgctaacacatttattcttcagcctatggatcaaggaataattttgactgtcaaatctcattacttaagaaatttactttttaagacaatagctgccattgatagtgattcctttgatagatctaggcaaagtaaatcaaaagccttctgaaaggattcaccactctagaagccgttaaaaacattcatgattcatgggaagggacattaattaactccaacataaactgaagttagtaggagttgattgcaacccttatagtggatgactttgaggacttcaaggtttcagtggaggaaataactttagatgtggcggaaatagcaagagatctagaattagaagtagaacttgaagatgtgactgaattgctgcaatctcatgataaaacttgaatggatgaggaattgtttcttgcagatgaacaaaggaagtgctttcctgagatggaatctactcctagtgatgatgctgtgaacattgttgaaatgccagcaaaggatttagaatattacataaacttagttggtatagcagtggcagggtttgagaggatcgactccaattttgaaagaggttctactgtgagtaaaatgctatcaaataacaccgcgtgctacagaaaaatgtttcctgaaaggaagagtcaattgatgcagcaaacttcattgtcgtgttattttaagaaactgccacaaccaccccaaccttcagcaaacaccaccctgatcgattagtagccaccaacattaaggcaagacccatcataagtaaaaatggcccactaaaggctcaggtgatctttaccattgtttagcaatatagtattcttaaggcatgtacattgtttttagtcataatggtattacacacttaatagattacagtatagcataaacataaattttatatgcactgggaaaccaaaaaaaaaatgatgtgacttgctttattggattcttagctttattgcagtggtctagaaccggtcctgcaatatctgtgaggtatgcctttatatccaaaggaatagaaatcagtctttcaaagagataccggcattccatgtttattgcagcactattcacagtagccaaggaatggaatcaacctaagtgtccatcagtgggtgaatggacaaagaaaatatggcatacatacacaatggaatactattccaccataaaaaagaatgaaattctatcacttgcagcaacatagatggaattggaggtcatttatgttaagtgaaataagccattcacaggaagacaaatattgtatgttcttattcaaattgggagctaaaaaggttgatctcatggaggtagacagtagaatgatggttaccagaggctgggaaggttagcgggggctgggatgtgggatttagagaggttagttaagaggtacaaaaacacagacgaaataagttcaagtgttcaatagctacagtagggtgactatagttaacaaggatttattgtatatttcagaatacatagaagatttgaaatggtcccttcacaaagaaatgatcaatgatcccagttactctgatttgatcattacacattatatgcatgtatcaaaatatcccatgtactatattaatatatacatttttttaattaagatttgaggtgctatatgtgcctgaggagttataggggatgccggtggaacgaccattacatgtggcagctggactgggcaacggccgatcgccactgtgctctgaggagagaaggcagagcttccccctttatctgctggctggtgaagtcctgagaaccgggcagtcagctaagcaccaagttttctctgactacagagctcctatcaaacggatgggtagaaaaggaatgttgtcataatagctaacccttctttagtgcttcttatagtctgggcactggactgaggtttatatgtgttatatcattaaaactcaatctctgggaacgactgttagtacttggtaggtatactattattattgtcgttttacagatgagaaaactgaggcccagagaaagtgagcaaaatggtgctgggggcgattaataggtggcagggctggaacatgaagccacagtctggcaccaaagcccattcatggagccccaactcaatgggctgcttctcagtagaaggctttgccttgtggaaggtagtagaatgtctaaaatcatcagaacacctgtgtggatggtacaacacggtgacagatatgtaccagggacctagatgtggagggagtgaggaggaaaggagcaacatatgcacctctggggaggccctaaggtctcctcagccaattcctagggaatttaattttaaaggacacagagagggtagtttttaacacaggttttacttttaagtcatgagggatgactttctaagccacagttccttctgataacggtcttaaaagagaagcaccatgaagtgataaacacatcagtccaggaagatttagagacagcctagtagaggaggattggaaacagtgtggctgtgtccctgagggtgctggtgctaaacccacggcacagtccatatcagtcaaagcttcattctccttgtgcccacactatgctgatctgccccagtgcaacagggagacgcatatggtcaagagaatgtgtctttcacgaatagattttctccttcgaccatggtgagaagtccttgtaaagaagcatacatgaatatatggatgtgttgggcatcagctgtgcgtgtggccctcagccaggtgagtggaggaagttggaggcattcagtgttcacctccatgtgcttttcagagacatacctggtgagctgtctgcagatacacagcgtagtgggagagatacgcacgtgaaagcagcacagggcatgtagctagcacttggtaaatattagtttccttcccctttctgtgtgtaaggcaagttgtacgagcaaagcatccgcagctcagaatgcaaaaatagatctccatgtggggatgtggcctcttttccccaagtgtggaccagatgtcaggccgccttgtgagtactcaaggaatgttacggcttccttcttcaggacttcactgcttctctccatatggagaaggctccctttccatgcacttcctggatctgaaaaacaagaacaagaaagaggatggctctaaagtctcaggaaatggacctttctatatcctcccttttaaaaagcatttgtatgtaggttttttaggtcttgctgtcaagtcggatacacagctgtcatctgttatatcggtgatttaataacataataaaaatttatagagaaccacaagctcatggatgtttgttttggagtgcatttattcatcattagtatgggtatttttaatcatttactgagggcctagcaaggtgctggtaattcagagataaggaagatgtcatcctttaaacttgagaagcttatgaatggcgaagagatataattaattgtgaatggagtgtggtagatagcatcaggttgtatatgaggtagaatcaggaaagcaagaatggccagctctgaatagagtgaggagggaagatgggagatgatccttgagttgtgtcttgaagaatgagcaaaaattatattcatggaaagaaaggatacaatataagtgacttgttgagtttttcttggctgatactaagaatgaattttcattaaatatgcaccagtaattcacaggaaatgatcaggtcagaatgttatgggacattggtctgaaatataatgagaggggaaaaaaacagaaaatttaaaacgtttatttatgatggctaatattcagaggggctaactccctcctgcccagataaggagaactttgccgcctggcaagggacctgcggctctgcactgccagggcaacagaaccacacgtctcaaacgtggtgtttaaagaagatgttggaaggttagaggcggtgtaatggatgggatttgacagttgctgtggcaacacacccacttccagaacattagtgttagtgggagggcaggcaaactcgtggtacttgccctgggctgccctatgtcccgtaccacctgttctatgccaaaggtatgaacaaattcaaaaggacaaatgcctcacatggctgatggctgcctgcctttgtagaactgaccctggaataagataagaagatgagtaaatcagagaaaagacaacagggaaatagcgtggaggaggagggggaggccagagcaagcagtgttaactcctttcaggtcaacatttcccagggttatattagaatgtattgactaactggtagatttttatggggaaaaaatgcatatggcatctgtgtgtctaaaatgcccttgatagaagcagtagtgtagaatgctttggggcataaatagtccttagagtagcaaaaagacaggttaatgcaaaattggttggacaggttttggttggaggcctgagtgattgcctccggagcaccaccttctggggagtcatgggtatgacatggtgtgaatattcctgaggtgtgggtggttggtttccttacaaggtagggtttgcaagctccttacatccacaggggctgtttcctctggaccagtcgttctcaatcttggcctcacatgagaattaccagtgatttttttaaaagaaatttaaacattttattacaaaattaatatacgattgttgtaaaataggactgtataaagagtaacttgagttcccatattccatttccagatttaactgtccacagtttctgcgtactcttccagacgttccctttgtgtttataagcatttatatacatatatatgggggtgggtgtgtatatattgtgtgtatggaaatatggaaatatatgtatatgcatacaatacatagtgttatgcatcttgcctttttcattcaatattttttggagatttttccatattaatacatatagatctgccggctgcatagaacctatgatctggatatgctataatttacttaacaatgcctctagggatttagattgttttcatcgttggattccattctttgtacacttgtgtggtatatctaaagttttcattcctagatgtggaattgctggatcaaagtgtgtaggctccaaaagaattgaactagttcacactcccactaaaagtgtgtgagaaagctgtttcctcttccattcaaaaaaatttttttttttttttacagagcccaggccccattttcagatcttctgggtgaggttggaggggagctaagtatctgtacttttacagagctccacaggtgaggctgatctgtaaccagggttgagaacttacatatgttcttatctatggccttagatagagggtgtaaaattaggagacgcagctcccactgatgatgcctgggtcatgtcctttcagatccaaattgcaagatctcctttaatgtggttaattgggagaaattgaatgacccatttcttctgaaatttctgttaaactggaggtctttatttagacaaatgtaaacattaatccatctttattaagataatgtatgattaaagcaacaaggtaccatctaggttctgtttgatacttttcttgttattctgtagttatttgttcataaaccattttttcttcttataggctttcaaggaagaattatctaattccttttggtgtggcctcagatttcattagcagtaggtagagtttgtagttattgaaagtctttctcttatttcagtttgaaatgttcccaggttggcacatagctttgggaactggaagtgtctcttttcccttgcttaggtagcctcaatagattgaaagaaaatggacatctcttcttcagaaaacctgttctaagaattatccatcttaggaaattagggtggttattgctcttctttactgcctgcctgaaaaaaatttcccagccctcatttctttcatcctttcctttgaggccatgacttgtcaccctctgctgtgttcctctgtcccctgagcagctgtaaggggtgagagtcacctaccctcaccccttacactcccaccaacctgaggaccacgtgtcttcatctaacagcatttctttttttttttttttttttttttttgagatggagtctcgctctgtcacccaaccaagctggagtgcaatggcgcgacctcagctcactgcaacctctgcctcccgggttcaagcagttctcctgtctcaacctcccaagtagttaagattacaggtgcccaccaccatgcccagctaatctttgtatttttagtagagacggagtttcgccatgttggttgggctggtctcgaactcctgacctcaggttatgtgcctgcctcggcctcccagagtgctgggattacaggtatgagccaccgcgcccagccagcatttctttcttttcctgtttgaagaaactgagtcctgtctactcccacccagcatttgcctggcatatcttcacagttggtctccttatcaaccaactgactcccatgattaggtcagattagatcccctgttcaggggatttatgtggggaactacacactgattgggacaggattttgtcaatgtactcaaatgacaaaggacttcagagatgttggaatattcttggtctacccaaaggttgcagaccacggtggcatttccttcttatataggtcctggtgggcatgggcttgagaagctgaaagaagacgcatggaactcagaatctgatcttttgatgatgacttcatatatatggtctgtttacccacgaggcacacaaaccttaccttatgcctgtgaaatataaaggcagatttttgtcccatgaaggtttctccatagactacattaagcaggagacagatgggtttagcttggctaatcttagtgcaagctggaaaatttcagtttttctgaaacaacatatttctaagaaattgtctggtctagaatgttattctagtgtatgttagggatctgtatgactgtaaagcaaggctgaattactgcaggcctataaatatgtgtgaaaatttacctacttctccctaccaacatggaggtggaaagaagtaggtttaataaaccccatttttattacgtgtgtaaatcagtggctgtttggccatttttctcctatgtaggacttgaatttatatgagaaaacttgagtgtatgccttttcccaagtcttggcttgcatctgaatgtaaaaatcagatgcatgctcaatgaatgttaattcagattatagatagctataaactatataggctgctctgtggtctttcctttccctctgcctgcatgactgaagaccaaactgtcacttccttataatctagttcttcccatgatacctcatcacaaaggtatatatcagttggtcaataacaggacttgtgcagtgaatacttacatgaagcagacactgaagtgcccagcaagaactgcaaaggctggcagtattaggagattgctcaccgtaccccaaatgagatgccagaggcataaagtccattttgtttaggtaccagatgactctgtggaattaacttgatttgtccccagtaatccatattctttagcatacacttccaggcaacacttattgcttagcaacacttacttagtaacctttcagaatgatcattaactaatagggagacagcctgtggtgccgatcgtaggctgttgaggctatctctacgggcattttcacctatcctgcctacttccgtaacctatgccccacaaaacatacactctccagacatgaaatttaaaaataatgaaagatgatgcaggaacttcagacactagatgcaatagacagcaaaaggaagcacctatgttagccttggttctcaacataccaagatgctcttatgaacacttctaacaaaatgttcccaaggagaacacaaagcaggcacctaacatccaagaagcatgtcatcacctcagcatgcctgccacacgtctagcgcactgcagccttcaactcctggtctcaagcgatcttcccaccttagcctcccaagtagctaggactacaagcacgtgccaccatgcctcgctaattttttgaaaaatattttttagagatgagttcttgctacgttgcccaggctggttttgaactcccagtcatattgttcctcatttgctttttttccttcttctttgttaagagacagggtcttgtcctgttgcctaggctggagtgcagtgccaccatctagctgactgcagccttgaactcctgggctcaagcgatcctcccacctcagtctcccaagtagctaggactacggacacatgccaccaccaggcccagctaatttttgaaaaatatgttttagagataagatcttgctacattgcccagactggtcttgaagtccaagcctcaggttatcctccctcctcagcctcccaaagtgctggaactacaggtgtgagtgcttggccttcctcatttgtttaacagatatagtaatgcagccacttgattaggaggcacagtgaccgctcttgagggatcaacagtgtaaccagggaaacatctctttggtcagtcccgtttcactagcctgttcaagaactggtttacctcctacctttctggcttttcctaagtaccttttacagagtcctcctcttcagctgtgcctaaactgtcagtgttccccaggactttttctttggttttcttgttctgtgtgctctcctggggagataatcagattataacatctgcatctccagtttacattgcccttctatagcctacattggtatatgaagctgagatccacatgctctaggcttcttcatctgggcatctgaaactcaatggatccacaatgagacattttattttcccttaaatgtgctcactccacaatattccctatttcagtgaatgtcaacacctcctttgcaggtgtccaggccagaaacctaaaagtgaatcttgctctctcctcctctttccccatgttcagttggcaacaattcatgttgcccccatctcattaataactcttgaatccacctagtcctctgctgttgatgtaggtgagctcttaccattcctggttcccctgtaagccaagctctgcctggttgccacaacaatctttctgaaacgagtcatctgatcaagtgagtcctttgctctaattgcatcgatagttccccgttctcttgaggatagaacctgaacatctaagacccttctgtgtctgtctcaatgcttaccactcttcttacccgccgtgagctccagttacaccagctactctcagttccccgactggcccatgaattctctcatatcttcatgccttcacatattttgttccctctgccttggttaccctttatcccatttacttttctggccaatttcaagacttggccaggatggcaactccctctgagggacatttcctgttgtccctgcactccctccaaagatagggatttgtgatcaacctttcaactccaacctgtgactccctgggcaaagcccttttatagcacatattattctgcaatctaataacctttttacttacctgtctgcacctccagactgcatgcttttaaagtttgggttttatttatatattctcagagcctggctcatagtaggggctcaataaaagtgtttaagcaaatgaatgtcttaatcaacaaagacatagtttatcattttctgtgtaaggcagtggcatggcctttgcctggaaagatttgcaatctcgttgattaaaaattatagagttacttaatctgataaaaaaattatcagtatagacattgtgagagaagttaggaggaattgtcgccaacattggtatagtcaggagtcggagggcttgaattagaccttgatatggatgttaggacaaatagaagtggcgaagacgcaaagcaagattgtctagaaacaaagcagaccattggcttaagcagagagcatgagataggaacaatatgcctccctgtggaggtctctccccagtagacaaagatttcagaccaggaggcaatgggaagccattggcttcctttgatcatggtggcgatactctaggaagagtaatctggtggctgtgttggcagatgggattgcaggtggcagagaccagttaggaagatcttgcagttgtccaagttcctcatgactgcacctgtcttgtgacagggatctgaaacacaaaggaaagcctccactgcactccaagaataatttattgctagatctggaaggagcctttgctatcatcccaaacatctcatcctattatttaacagtggtgggcaaactgaggactaatctcaaggttcccataactgatggggtctttggattccaatccttgtctcattttcccaacctgcctgggaagtgggtggttaaagtttaaagcctggaagaatgggggaaatagttcacaggcatgaggtgacctgcaggagaggctgatggtctataggagattggaggatgagtttggcttaaacatgttgatttagaaatgacagagggattggaggcaatgaccagcagtccacagatcagtttaggactctgtgaacgttagtggaagagattacagagaacactggctaggagccaaggcaagaaggctttggaaaggcatgtttgcctttgagtgcttaacttagagactcatgcgggaaagaatctgtggatctctttgagaagctgcagaacagcagatacacctgaatcctattcatgttcatccagaaacgcagactttaaaacaaccttgttattcttcctttgttttgtttcgtttggttttagggggttggaggggagggaagggtgtcaccgggggagcatatgggtcatttgtttgcagttcacaggggttcttagtgaacatcagcgaatattgtcgctgatttcgtctcctgcttcactctcttttctaaaaacaaaatatttaatgtagcccaaaggagaatagtcagtttaataactagccatggcagctctttgaaaactgcaggtttcaaataactaggcctgcacattttcaccaactcagacaattaaaaagactccagggacctaggtggtgctgattcaagtggcgcatattgtcatttaaaatggaaagtctatttctgaaaatagactccaggtatgggagaacttgtttctctgctggagaaggtagcccatcctagggggaccgaggtaaattgcttagtggctcaacatctacatagttaaaatgggcccatttggccctacctacttcgcagagttgttaggagggcagaatgaggctatagataggcagcatgtcattggactaggtccgccagatgcagaatgttgacaaaagcagaagtcccctcccctcagactcctctggggaaagctggcagccttgaccaccatcaccgctctgcacaccatagcagggatatgagaaggggctgaggtgagcattggactggaggctcctccagctgtctcttgttgcctgtcctctagtgtgtagagttgcagtgtggcttgaaatggtcatcacacccaccatcaccatggcagccctgggaggagggactggctgctactctctcaagaagggataactgttgcacaaaacactgcagactttgagctggccagcagttgaccagctgacctaacctcccgttttccaggtcttaacctaccatccattccctgcaagtacagaggaaactagaaagctacccttctcccaccatagttctgtaactttgggatggagtgagaagcatggcattgttaccaggtgatagggctcattgtccagtgcactagaagccagtattatggcactgggtctttaagaaaagaaaagcttttatttcatgtcagccaacaaggagacaggatccagctcaaatctgtctccctgtgcttgctggctttcaggcagcatttgtattagaaaaggtttaaggggtggattttgggattagcaggtgattggtggcaggaagggtgaggtctggaaagtccttgggcatgcacggttatctctctctgcatcctcatggatggtttgtgcaaattcagcgaggggggtgaatgtgaaacgtgtggcggaagttctggctgtgacgtcagtaagctcgttctgcacagactccagttggccatattggtcccaaacaattttagccagccttatctttccagtagagggagttttagtgtttccacaagcttttatttaattttttttttcttatctgccatcctgtaagctcaagaatttctgttagtcactggtttaagtctttggggcatggtttcaatatgagtgtgggaaaggggaagccattgcctcttgtttcccattcgtgaccatccctacccacttcagtgggcccagtgttgccagacctgaaatatacctcatgtgggtgtttgtctctggtactctgggttcatttctggtcaccctatgatatttccttgccctaaggtactggcacagctatcgggtaggaggaggccaaggtagaaggcacagagccattcttgcctcaccttctgccacacggtgaccccacatgtctggggagaggctcccggcccagggaggaggaggtggaaggtgcactgtcataaccatcacagggggcaatggcgagaaggctcatgggccacgtgcctcggccattagttgtcatgtctgttgtaccccaacttaactgacttctaaccggctgtggttatgagttccgctggtctcacctttcagtgggttcaagggggcagattttgctgacaccataggcaaggaagcatgatggtaaacaccactggaatgagaggccttgttaatccagcccaagctcctgccaagttagaagctgaggagtctagtctgggccactttgagtactgatgcatgatcccagggcgatgtgctgttctgggcacagggtcacactgggtgacatctaacaggctttgcttgggctgtagctagagggaaatgggagctggggagtgtgacaggagggaagtgtggactctccacctaccaaggggccttcccacatactgtccatcccattcagcgccctgaggtgggcgtcatttctcccacttgacagataagggaatcagaccatgaggcagagtaactggccccaggccacacacaactacgtagtgtcagagtcatgatgaatcctgtttgtctacaccttctgatgaactgagctacctcgtgcaggacaggcccaaggaaaggggctcaggccagagtgggagcattgaaacagggttcaaaatgtctgtctgcccaaaccaaacgttaatttgcatactaatagtttaagggcatagatataatacagacctcccccaagaagtgacctttgaagccaacttcttcttcatgtgacggaatacatcagacaccctgtctgccgggaatccttacccttctcctagtgagccgtggtctctggcctatccagaagctccttaaaaatactagtgcatgagatgtagcattgacaggagccctggcctgtgggtcaacagttgctttgtcaaatgcaatcttgcccttggcacagctcgccattcaggaggatggaggaagtggacgagagagagggaggtaaaagaagggagggaaaggaagcaggatgcctggctgcctggagcttccttgggctcttgtccatgagaggaagccatacctacctctctggggtttgccaactcttgtccaggaacctattgggctagagtggaggggaactgcagagtctccccttcctttctcttctgcccccatgaggaggaagtgaagtggagcagaaagagcgtgggctatggttgagcccactggagtctgcactccacccagcctccccctggctttctagctgtatgactttaagcaggtggtttcaccccctctccctctccactttttcctctttaaaatgtgggatacagtgcccgcctcgcagaggctgatggttctgtggagtgttgtgcacaaggctccagcccaggtcctgatgcaggactctcattctggaaggctgggtgcctggctctccttggggcacaattaggcttcctggctgcattcctggggcattcgcatgaaaaagaacatgggctttagagtgagaaggatggggagatgagtctctgtttttccatctgcgtgggcaaattatttagcatatctgagcttgtcttaagctttctgttttctattcctttatttccacatatggaaaatgggtatatgaactattctgccttcatatagctattgtgacaattaaatgaagtaatctctgaagaaccttactatcagtattactgatattaccagagaggtggctcatgtttgtaatcccagcattttgggaggccaaggtgggagcattgtttgagcccaggagttcaaggtttcagtgaactatgatcacgccactacactgcagcctggagacagagcaagatcctgtttaaaaaaaaaattgctgatattgattattcagtaggccagggaagcccgtctaccagcctacaggacgtcattgcattcaccttctcagtaaatggcaacagactcttttcctaatgtttacacgtaatggattgaactggcttagcatcatgctttacccatatttctgttgacagcctgttactgtgtggagagaattgctggataagagccactgagatcaaagggatctttacaatgggcctttcagtatatttgttctgtaatcatggactgaaaacttactgagcacttgccatctgaatgaggcaaaaaggaagtgtgtgtgtgtgtgtgtgtgtgtgtgtgtgtgtgtgtatgcatgtgtatgtgtatgcatgatttgtttttgccttaaaattagtacatcaaccgtgtaatgtgcaggacatttaaaatatgtcagagctatgacaggttcccagctactgggatccaggacaccttccaatttcatctttggctaagactttctatctcttttttcttcttctttctttctccccctcccttttgatgcctttctttccttccataatacctttctttattctttctttatttcttctttgattcattcttgtatttcttcttggtttcttaattcctctttctttctcttcctttcctccctgctgcccaatacacttctgacctcagggcatagatgcattgaagggcatctgctgctgtggccttttggatgggaaccctgtagatctcagctaggttggtttatcagctataatgtattccttgatttggtaaaacagccagcagcagagcaacatgcttttacctcctctttttttttttcctcatcccatttcctccctctctttggtttcttcttcctttcaagggggttgaatggtctcctctcagcggccttttttttttttttttttttttttgagacggagtctggttctgtcacccaggctggagtgcagtggcgcaatcttggctcactgtagcctccacctcacaggttcaggtgattctcctgcctcagcctcccaagtagctggaattacaagcgtgcgccaccatgcccagctaattatttattattattattattattttttaatagagacagggattcaccgtgttacccagggtggtctcgaactcctggcctcaagtgatctgcctgccttggcctcccaaagtgctggcattacaagcatgagccaccatgcccagccttctctcagtagcatttaacacagactcctggaacatacatgcacaaagtgaaaaaaataacatttttaatttctgattttgaaagtgaagatcctcattatagacaatttgcaaaatattgaaaataagaattaaaatttgcccctgttcctcccaaaagtccctgttaggatctggggggtgttatgtccagctgctcagtagctcgtgctgtcccctccatgcaggttccatctagaatctggggcagcagcaggtaaggccaggtcactgttctgtggggcttacatgggagtggagggaagagatcagcaatatcaaacaaataaaaaagatcgtttgggatggagataaatattgtaaaaaaaaaaaaaaaacatcaaacagagttgtttgatgggtattgagcaggggtagaggaaagtcagagggttcgaggaattggcatttatgctaatgtctacataacgtaggaggactaggtaggcagagagcagaggaagaatgctttaggtagagaggaaactaaatacaaaggcctgggtgggatcacattcaggggacgcaaggagcagaaggaaggccagtgtggccaagtgtgtgagtgaggtagagccgtggatctgatcatatgtggcaatgggaagccttgggagggtttgatatggagatgtgacccacacgggtctgcatgtttagaattatcacagtgtaccgctgtggagacgtgggagatagaaaagggataatggttaaaagttgcagtagttcagaggacagacagtgctggcttagacaaggggaatagtctgtttatttgatttactttcaagtatctctgaactattatctgtattttgtatatgtgtttatatagagaccatttattgcacactttccgggtactacagattgtgctaagcactttgtatgtattatctagttcatttttcacatagaatcaggcatagtaatctccttttacacataagggaattgaaactcaggtaggttaagaaaagaagggggaaaaagtcaacgatagtccctttccccaatacagaccttattaggatttagaggggcattttttgggggtcatttatttacaaaggcccaagtttataacatacaggtgacagaatcagcattcagacccaggtctgactcacttcacagcgtaaaacgactgtcctgtacaaatttaaatcctgctataatgttattgtgggtgtaaacactctccccctatgcaataactcagcttataggtcagtctccattgcaatgagaatgtttaccagacaatcacagaaactcaccgtacacaaataaaggcttattgttcactcatctgtaattgctatgggttgctcaggtggctctgctgatcttggccggactcacatatctagagttcaggtgatttaagctgacctaggctggcctcttctttcattttccagcaggctagactgggcatgtttatggtaatgacagaagtgctacagaaaaggggcagaaacatgcaaagcctctttaggcccagcctcagaactaacactatcatttctgccacattctgttggccagtgcaagtcagagaccagcccagatgcaagaggtagggaaataggctctgcctggaagtgcaggtcccatggaataggacatgaatgggttaggaatgagcctttggccatcaggacgttagtgttaagcttttgcagaaaggacttgttggacaaataacagattcctgctgcgggaatggagaccagctaatatggcctgagtcccgaaagcccatatccttaggctgtatttgtgaggttttaatttaatctttgtatatatcgtgagcactcttcgttgaccttatagtgttgctatcatctcctaagttgattggctccctgaatgtaaaaggattttcagaggcaggcatggtttgtagcaaagtcagctgtaatccctgatgatggtatcatcatcgagggatgccaagagggtaaaagcactatttcagattatggctacgtgggatccaggaagtcatgacaagtgaacagaccctaaactggtgatgaggaggagggcagaggtgagcaggagggaaagattcggcaccaaactttgaatcactaggagtttcactcatcagctctaaaggaaaccctttggccaaaataaaaattgtcttctctttcctcagccttaattgatagaggataatgttatcagctggctaatgctcatcagtgatcaacattagactactgtgttttgacgttactgctgcaaatctcctgctttattaactgcctgaatgaggagcacatcagaaagattggaggtgttgcaattagcctttaggatgaaataataagtaacactataatttgtgactttgatgcagacatcaatttaaaacataaaccactgactagagaagagataaagacagagtgctgctgttccccttcattgatggctgcttgctaatgagctaattgaacacaagctgctaaattcttgctaaaatacgaaagaatatgaaatatcctgtttccagttatactatttggaggtttagccttgcctaatctgtgacaaaagtagaggccaactttgggtttgaaggtaacttctattctttttccagatttctttaagccctttgttccaccctttcctccagaaaccctccttggttcttctggaagtgactttcagcaagaagcttttagaaagaaaaacaaaaaaaacgaaaaacaatgttccagtaactgcagaggctacatgatggggttgatcttgtccactatggatcttttaaataaagctttggaaataccaagctcagacttaacaaatacaggagaaaaaatggcatgattatctcaataaataaatatcaaaaggcatttaagagaacttaatacattatttctggttttaaaaattattagtaaaacaaggttggaagaattggaactgccttactttgtcaagttgtatctactaagatactagaacaagcctttatattgaaggatctgaagaattaaaagcatattcctttaaagtctgggacaagcagtgatcattagtctcagtctctctttcttctcattgtcttgcagaaaccggctaatgcagtgagactgaaaattattaaaaagaaagtaggaattataaacatagaaaggatgccacctctgtctatagaggcagaagatgagattgttcacctaaaaactaagagatgttagaactgttagaactattagaactaataagaaagtaaagtggctggatataaaccagtaacttttaaaaccagtagcttcctatatagcagcagtaaccgcttaggaaatataatagggtaatataccctagtaacaactcttataatacatttaaggaataaactgaaatgtgaaaggctaaaataaagaaaactataaaactaaactgatacatgtttttaaaaaagcccacaaaaaataaaaatggagagcatactgtgggtgtattcaatattttaaagatagttgtcctcaaatttacctgtgaaattgtaattcaaaaatgccaaatattattatatttaaaacggtaactttaaatataacttaactaatgtattctgaagtttacctagaagagtatatgtataaaagtaccttagaaaattttctaaaaagaacaaataaccaataaacatgcaagatgttcagtgtcaccagtaacaagggaaatggaaattataacaatagtaagaccagcctggccaacatggtgaaaccctctactaagagtagtctctactaaaaaatacaaaacaattttagtctctacttaaaatacaaaaaaaaattagccgggcgtggtggcgggcgcctgtagacccagctactcgggaggctgaggcaggagaatggcttgaatccagggggtggaggttgcagtgagccaagatcacgccactgcactccagcctgggtgacagagcgagagtctgtctcaaagaaaaaaaaacaaaaacaaaacaatagtaatagttgtgcatatcagattgccaacatttaaaaaatcatattgtgtgacacgtgcactcttacaaatggtggtgcaagtgtaaatagctatgacattttttggagcacagtttggcagtaggtttttaaaatttattattatttttaattttagattcagtgggtacatgtgcaggtttgttacatgaatatactacgtgatgctgagatttggcctttgattgaacccttcatgcagagagtgaacatagtacctaatagatccttttcacaccttgccccactcacttcctccacctttttagagccctcagtgtctactgttcccagcattatgtctgtgtgtacccaatgtttagttcctacttagaagtgaaaacatgcagtatttggttttctgtgttaattcatttaggatgatggccgccagctgcatctgtgttgctgcaaggggcattatttgattctttttaatggatacatagtattccgtggtgtagatgtatcacattttctttatccaacccactagagatggcacctaggttgattccgtgtctttgctattgtgaatagcgctgcgatgaacatgcgagtgcaggtgtctttttgattgaaggatttatgttcctttgggtataaatccagtaatgcgttgctaggccaagtggtaattctatttttagttctttgagaactctccaaactgctttccacaggggctgaactaatttatattcccaccaacagtatatgaatgttcccttttctctgcaacctcaccaacatctgttatttcttgactttttaatagccattctggcagtatgtttaaaaatataaaatgtacatgcctcttgcgtgagcagtctcacttctagaaatcacttctataaaaacatatacctaaaaatccatcagttgaggaattatacatcgttatatatccaaactatgggatcctcttgaccctttaaaaagaaaaagtagttttatttgtactaacattggaaattgcatatggtatattgatagattaaaaaagtaacttgagatatgtgggtagtataataccatttgggttaaatcacttatgtgtaaaaaccaagatataagaggttcacgtcaagatgttaagggtgatcacctctggaaagacagtgagtgagactgggggaagaggagaatagcaagaaccaggactttcactctctttacacattcctgtatttgttaacatttcgcagcgaacatctttgatcatttaaaaaattaatgatgcattcttatattgacaattcttatactaaaattttgaaaatccacaggagataggaaaaaataccccttacttttgatactattgacattttgaaatgaaaggaaaaaatgagtttagtagagttaattcagcagaaaatataaatatataagatggcactaaggtatctttggggagaaacgggacctggttttgtttcgcaggtcctttgccatttgctgtttgatactggggaagccacgtaccttgtctgtggtccagttaggtttctccactctgcaggtagggctgacctacttccattggaggaaaaacctagagagaaagaatgtcaagaaaggttccacctgaatgggaagtgttattgttagaatgtccatgaatgaatgtcagagtccagcatctcagaggccatcattaaatgaggagcagtctttgtagaagctgaactctgaagtatgcatcatggtgaggagtcaggtggggataaatgaataaaacataaaagaccatgtggtatggtagaggaggaggtgtgtgcgtgtgtgtgtgtgtgtgtgtgtgtgtgtgtacagcttaagaacataaagcaataaaggagaacattttgatacagcataataaacaatattggagtactaaggaggagcttggagcaattcgatttgggaagtattaagaggtgttacatgatgataggagatgggtgcacatgcctgtgtaagaatggggaggtggggacattgtagtgatggggcattggcattgggtagctttgttattaagttcaaagagtttctaaagggaaaataaaatccccatttgaatcacaggtggttcattttctgaggcaatctcaagaggcacaagatcaaatctagcttgacaccatccagtacagaactcagcagtctctagaagctggagctgagctacagcttggctaatgagaactctccatcctctgccagcacctcagggcccatctcttcctctttggcaagcaggatacaaagagagcgcaaagcagagtgggacctagaaggtcacccagagcattcattttgcaaactccccaccaggcctttccagaagacagatgatcacggtttcacagttttgctagaatccgagccagtggcttcatgcttcgacctggggtaggttttaatgaaacctaaagaatacttcacacattgacctaccattggcagtgaggaagagggggagatgggccaaacacagctgaacgacatcctctcatttattcatggggcgtgagaggagtgattgtaaaattcagatgaaaactagaagttaaaattcagagctcccagtataaacatttgggtctggtatgaagttcactttcaccagtaagacacattgagaaacacaagaaacccattgttctctggatgtttgtgcatttcagtggttttgcctgtaggaccctcaagtggaagttagattgtctctattatgttctttctaatttgttaaatatttcttgaactaatctccttctcactatctccattgctaccgttaatgtgtacactgtttatcacaacagccttgcatctcatcagtctgcagccgtggctcatgcaatccgttcatcatgctgcctgattcttctttccaaacatcagctctttgtcacttcactgctcagcatctctcactgacatttggattgttcaaaatcatatccccactgcccaccttcttggccacatctcttgtgcttgcacctctccccactctgttttcttctgattcaatgtgacagctacccaagactatacgtggttctgcaaaaatgcaaacctctgtcttgtcttggcacctagaataccctttttttgctaattactctttgtctcaagatgcggctgtaccaagagtcatctctaggaaatgctccctaacctcctttgtgttacgtaccatttcctcacactgtggaagcacatgagaattacttccatcccaacatctgtactctcccctaactggctagttattggtctgtctccctgactcacctggaaaccaccctcaaggtgaaaattacgtagttctgttcattgcatcttgcagagtgcctggcacatcgctgtgtgataggaaagaatgaatgtgtatttttaaattgggcttctccttctctagtttttgaacatgtgtatgtgggtttctgttttgcctgatgtgacgtgagtcaagtcatactcaacctgctgtgttctcagaaatgcagtgcggatgagtaagataaatcatgttagcatcatatataagtgagctgaagactcttaccactcatctcagagcaccattaagtagctgcctactgggtctctctagggtgttcatgaattaaaactcctgtgttgttccaggtcagctgttgccagcaaaccgcaatacaccaagtcccattgatcctgacaccatccaggtcccagtgggttatgagccagacccagcagatcttgccctttccagcatccctggccaggaaatgtttgaccctcgcaaacgcaagttctctgaggaagaactgaagccacagcccatgatcaagaaagctcgcaaagtcttcatccctgatgacctgaaggtaaattggaactggtaatcagtctttgggcaaatggagagtgggatccacagacagattaaaagggtgaccccaggatgatcccagaagctagtgcatgaaggatttctgatttctgatcctgtttcttggcatgtgacttctaggccagttgtttcctctctgggtattttttgaaatgcacttttatgtcttgatgctgaacagaaacaaggagaagcagtaaaatgttggagtgattttaaacccatgaaggaaacaaacctgctcctatctgcatggaaacccacaaaagtctaataaaattaaaccccacatctttcaaggttgagaagagaaagaaaatcatttgagaagggcatctgaacctcattgccctcgaagggttaccttccttttagaaaatttttgataatttgctgctgccatttccctgtaggctgcgaggaataacagccagagataggaccttcctccatattgccaaccttggatgaccagggtgggattttgtgaaggaaactggtagttccctgacaccatttatatgtatcttaagtaacgatcacttgaatatctcaccgctagattaattctaagtaggttttctctgcagtgttgaagggacaccttatttataaagggaaatagatttaccttggaagtcaaatacagcttaaaacaaaattaaccagacacaataatgacatcttaggatgaaaattctttccaaaattatgccatgtctgctaatgccaaaatagaaccatttcttattaaccattgcttagaactttcatgcttctttccaatcatgtgggtactagagatatgattattatgtagtcaaggccttggaaccaggcataattagcccttttctactgtctgccccccatctctcaaacctaactattgttcctatgtagagacactcctaggctgggaaataggaatttgagacaacgtctgaactggcttagaccagttgttcctgctttacatagctagaaaaaatgctggaagcagaagtacctggcaaatttaaatcactgctgtcatccacattcctgagattaccttaattgatgcagaataggaaaacatcagggctgaaggggaccttagagattcatttgtccaaaattaccacttgcagttgaggaaatgcagaaaatggaaagctgaagtcagcggatcactacctgttagagaaaggcttagcctggctcccaggttgtcttgcttcccaaaaggtcacagcagcatgttggccctgacaagggctataacgggggcccatgggtgacaaatcaatggctgtcaccctgagaatcaaaaaaggaaatcacatggtaaaaacaccagaaaatctaaactagtcaggacattgatggttagactgagatggggtaaaaaaggggcaccatgggctcaggtcttgggcaattaggtaccttatttcaatgagatgcctttcctagtcttgtcttcttagtgatccaattttttatggtgttttttttttttttttttttgagatggagtcgcactctgttgcccaggctggagtgcagtggcacgatctcagctcactgcaagctccgcctccccggttcaagccatcctcatgccttagcctcctgagtaactgagactacaggcgcacgccaccacgcccggctaattttttgtatttttagtagagacgggatttcaccgtgttcgccaggatggtctcgatctcctgaccttgtgatctgcccacctcggtcttccaaagtgctgggattacaggtgtaagccaccgcgcccggccttttttgtgtattttaaagcctcgtatcttaaactaaagccagggatcctgttcaacctggattttctcttgaatggagggtagtttgaaaggatgctgctatgagtgatagacagaacttccagccagactttcacaaagtctccagatttatcaaagagcaagattagttaataacccaggtaaccttggcaacaaagaggccagacaaaaaccgtctgtgctggaattacacatattgctgctgtcatggtcaggcctgacctttccacatagcaggtggggaatgggcaggaacattgtcctgccaggtgtccttggatattttttagttgtggacgaagtctcaaactaaagaccatgagctaatataaagcaggaagcagagctgtaacatgtttctccttctggcagaaaggtctgagctaagggtagatggaggagaaggtgtttctggcccccagcattggacaagtaaaccagttcaatgaaatggccccactaaaaatgatcttccctgtagctgcctgaacttcctctcttgagccaatcattagggttagcatgcatgcgctggagaaagaagggagaattgaggttgacatgctggggtacctagctgaaaatccatttaattaccttgattttttaaatgcttttaatggtccattcattcacttgatgaattttttcaaatgctagtgtgtgccaaccctctaaccctgtatcaggggctgggaataccgaggtgagccaatactgatactgttcctgccttcatggaacttgtagtctggtgagaaacagggagtgttgatctgttgggtggggcggggctaagtgggtcccttgttgcatggaggtaactgggtagccagatggcatcagcaactgggagagggaaagggggcagaggatggagtgccaagtttatcagccccgctcaaaatcccgcttcccccctgcccgcaacccttctgcgataacaaagggaggcgagcaggcttttctagtccaggacactcctttcgtcattcctgccttctgtatcctcttctggacccggttcccagctcccctccctcccacctgaaaggtttgttttgcattccacaccttggctggctcatctgcatgtgtggacaggtgaggctgggaaatgagagcactttagaagtgagaagagctctaataagttagagagaagttggttgttaccctgaagtcagctggtgactccctggtcattaagacctggtcagaattgtcttacaccacatcaagcctgtggcctatggtgggaccccccattcctcccccatcacatacatgcagtttctacagtgttccaggggcttgttcttatgtaccccttcgcctcctgggctcctgttcccccgtgtgcagactctgatacatcctaaatcaagtcctcttttgagtgctcttggaaaccgcactcccaggcacattgttgggtatagatttactgatactgtgaagggattggaacccaggcttctatcaaaacacaaataacttccatcagaactggaggcttcaccactgttgttaactggaggcttcaccactttgggccccctcaccaccatgacgtcattgactcgcctgactcctcccagcctctcccctgcctccagctcccctgctcgctttcagaagcacagacaacaaattcggccaacaaccattgcacacctgccctagcttgctcacccaggtattcttcaaagagcagcctcctccctcctacccagaagaattctggtaacatctattttgaaaatcgtttttttaccctgttgcatattgttatgaaatgtataaaaagctgggggtgctttatttaagatgatagtactagtttgtggatggcagataggaggtatctacacagtttctatcccacactttctgtatttgtgcagggcaaatgcctgttgagggtaatgggcagttttgggggtggaccgctgaccttagactttccttgcagctttggccccaacccatgtgacctccttcaatgccaactgccccttggaattctgaggggtgcaagcactggcctgacccatttattctgggtggcatgtaactgcaggtagtagcattgctaggactgagggatttgctgttgcaaattgttgaaaaaggggagttgcaaaattcaccaggtgccaccatcagtgaattgggaagatctaaaagaagatccctgtttcttagtcttcttaagaagtttttcctttctgtcagggaggcagcagtgggggtggagggcagggaaggagggattgtttttacactgaccacagtaaaatattactcaggctaattaaggcctagagaatggttaaacaagaaattagagtaaattatgtaaattctggccaccaatatgagtacattgattagcggcaggttgaagatttttttttttaatttctatttttaattaccaaagtgtatgtatctattatatgatattgtaatagttcagaataatataaaaggtagaaagtcttacatctttgcctctgccaatcccccttctagaggctccacctttatagattagtataaatctttttgcgcctctttctatgaatatatgatttttaatcaaactgggatgagaccatacatatttgtgtgtaaactgtcattgtttccacccacatagtggcatatcatatgaacatctttctggtgcaggtgggtcattatttttaacagctgccaagtatccctttgtatgactgtatcataacgtggttgttaaatctcctatgcatagtttttcctcattttttctactgcacataatgctgcagtgaacagtttatgcttgtgtgtacatgcacatgtatggagattgctacaggacaaaatcctggaagtggagtgctagatgaatagtatatccatttaaatagttgatagatattgccaaattgccttctaaaatttttgtaccaactcatacccaaaaaagcatatgagtgcccttgaaggaaaagggttcttaaaatgttgagcagggagagtaaagaaagttgaaatgtaatttaagggtgaggtgagccacctgctttcatccagcctctgatctctgcttcactgagcacgcctctgctgggcaaagagtaggagcctgttgggacagatcggtgggtccttgctccaagaaggaagtgtggctcatgggccacactctcagacatgcagaaactgtaaaggaaggagacacaagctaagaaacccgggctggcacctctgcacaatcctggagcctgcccgtgccctggctggcactgggctttgctgaaatctaatatcttgtttctttttcccttctgtaactaatgagcaggatgacaagtactgggcaaggcgcagaaagaacaacatggcagccaagcgctcccgcgacgcccggaggctgaaagagaaccagatcgccatccgggcctcgttcctggagaaggagaactcggccctccgccaggaggtggctgacttgaggaaggagctgggcaaatgcaagaacatacttgccaagtatgaggccaggcacgggcccctgtaggatggcatttttgcaggctggctttggaatagatggacagtttgtttcctgtctgatagcaccacacgcaaaccaacctttctgacatcagcactttaccagaggcataaacacaactgactcccattttggtgtgcatctgtgtgtgtgtgcgtgtatatgtgcttgtgctcatgtgtgtggtcagcggtatgtgcgtgtgcgtgttcctttgctcttgccattttaaggtagccctctcatcgtcttttagttccaacaaagaaaggtgccatgtctttactagactgaggagccctctcgcgggtctcccatcccctccctccttcactcctgcctcctcagctttgcttcatgttcgagcttacctactcttccaggactctctgcttggattcactaaaaagggccctggtaaaatagtggatctcagtttttaagagtacaagctcttgtttctgtttagtccgtaagttaccatgctaatgaggtgcacacaataacttagcactactccgcagctctagtcctttataagttgctttcctcttactttcagttttggtgataatcgtcttcaaattaaagtgctgtttagatttattagatcccatatttacttactgctatctactaagtttccttttaattctaccaaccccagataagtaagagtactattaatagaacacagagtgtgtttttgcactgtctgtacctaaagcaataatcctattgtacgctagagcatgctgcctgagtattactagtggacgtaggatattttccctacctaagaatttcactgtcttttaaaaaacaaaaagtaaagtaatgcatttgagcatggccagactattccctaggacaaggaagcagagggaaatgggaggtctaaggatgaggggttaatttatcagtacatgagccaaaaactgcgtcttggattagcctttgacattgatgtgttcggttttgttgttccccttccctcacaccctgcctcgcccccacttttctagttaactttttccatatccctcttgacattcaaaacagttacttaagattcagttttcccactttttggtaatatatatatttttgtgaattatactttgttgtttttaaaaagaaaatcagttgattaagttaataagttgatgttttctaaggccctttttcctagtggtgtcatttttgaatgcctcataaattaatgattctgaagcttatgtttcttattctctgtttgcttttgaacgtatgtgctcttataaagtggacttctgaaaaatgaatgtaaaagacactggtgtatctcagaaggggatggtgttgtcacaaactgtggttaatccaatcaatttaaatgtttactatagaccaaaaggagagattattaaatcgtttaatgtttatacagagtaattataggaagttcttttttgtacagtatttttcagatataaatactgacaatgtattttggaagacatatattatatatagaaaagaggagaggaaaactattccatgttttaaaattatatagcaaagatatatattcaccaatgttgtacagagaagaagtgcttgggggtttttgaagtctttaatattttaagccctatcactgacacatcagcatgttttctgctttaaattaaaattttatgacagtatcgaggcttgtgatgacgaatcctgctctaaaatacacaaggagctttcttgtttcttattaggcctcagaaagaagtcagttaacgtcacccaaaagcacaaaatggattttagtcaaatatttattggatgatacagtgttttttaggaaaagcatctgccacaaaaatgttcacttcgaaattctgagttcctggaatggcacgttgctgccagtgccccagacagttcttttctaccctgcgggcccgcacgttttatgaggttgatatcggtgctatgtgtttggtttataatttgatagatgtttgactttaaagatgattgttcttttgtttcattaagttgtaaaatgtcaagaaattctgctgttacgacaaagaaacattttacgctagattaaaatatcctttcatcaatgggattttctagtttcctgccttcagagtatctaatcctttaatgatctggtggtctcctcgtcaatccatcagcaatgcttctctcatagtgtcatagacttgggaaacccaaccagtaggatatttctacaaggtgttcattttgtcacaagctgtagataacagcaagagatgggggtgtattggaattgcaatacattgttcaggtgaataataaaatcaaaaacttttgcaatcttaagcagagataaataaaagatagcaatatgagacacaggtggacgtagagttggcctttttacaggcaaagaggcgaattgtagaattgttagatggcaatagtcattaaaaacatagaaaaatgatgtctttaagtggagaattgtggaaggattgtaacatggaccatccaaatttatggccgtatcaaatggtagctgaaaaaactatatttgagcactggtctctcttggaattagatgtttatatcaaatgagcatctcaaatgttttctgcagaaaaaaataaaaagattctaataaaatgtattctcttgtgtgccaggagaggtttcagaaacctacctcgtcttacaaatttaaacactttggagtctgtacaggtgccttatatgtaggtcattgtcacgatacacacacacgaacactccctctggactggctgcctctccatccagggcagttaactagcaaacaaggcagatctgcttcatggagcgggaggccatggcttgactctgagtgatttgggtcaaccggagtcagacgcatgtctgcacgctgcagctattatgagagtccctttgtcatttttcaccttttcatcctaagcatctttcagagattaattatttggccattaacaatgaatccaaatcatatcatactgacatcatctagacatgatttggaaggaacagcttaggacctcctgatgaggtcacattgttgtttcttttaactagacttggcaaagaaaggcaaaaattgaccagcctatctttctgctggtgctgccttaaggaggtagtttgttgaggggagggctgtagatcattacttctttctcttcaggaagtggccactttgaaccattcaaataccacattaggcaagactgtgataggccttttgtcttcaaatacaacaggcctccactgacccatccctcaaagcagaaggaccctttgaggagagtacagatgggattccacagtggggtgggtggaatggaaacctgtactagaccacccagaggttccttctaacccactggtttggtggggaactcacagtaattccaaatgtacaatcagatgtctagggtctgttttcggaagaagcaagaattatcagtggcaccctccccactgcccccagtgtaaaacaatagacattctgtgaaatgcaaagctattctttggtttttctagtagtttatctcattttaccctattcttcctttaaggaaaactcaatctttatcacagtcaattagagcgatcccaaggcatgggaccaggcctgcttgcctatgtgtgatggcaattggagatctggatttagcactggggtctcagcaccctgcaggtgtctgagactaagtgatctgccctccaggtggcgatcaccttctgctcctaggtacccccactggcaaggccaaggtctcctccacgttttttctgcaattaataatgtcatttaaaaaatgagcaaagccttatccgaatcggatatagcaactaaagtcaatacattttgcaggaggctaagtgtaagagtgtgtgtgtgtgtgtgtgcgtgcatgtgtgtgtgtgtgtatgtgtgtgaataagtcgacataaagtctttaattttgagcaccttaccaaacataacaataatccattatccttttggcaacaccacaaagatcgcatctgttaaacaggtacaagttgacatgaggttagtttaattgtacaccatgatattggtggtatttatgctgttaagtccaaacctttatctgtctgttattcttaatgttgaataaactttgaattttttcctttctttcatgtatttttattaacagttggctagcaatggtattctgttcccacctcggtagcaaagagaccatttgtagagattattacctagataataaaatgataatactatataattagtaataaattaacatttattgggtagttatgtgccagacactgtgctaaacacttagatggaatattttattccatattagctctatgaggtagggacaattattatccccatttacagaagacaaaatggaaagttaggagagtcacgtagcttacctaatgttacagaggtaaaagtggctgagatgaattctgatccctggagtgggcattatttagaggggtggttcccaaaagccagtccacagactgtcttgttctctaatatataaagaataattcagcaacatctaggagtataaatccagagattctgaatcagtagttcttggatggggcccagaaatctgaatttttaaactgatcccagccaacttccatctgcagccaagtaattggtgtcaaggatttatagacttggctcttaattcaagttcatgacccttgggggatccacgcagaggcttcagagatgccataattatctgaaattgtatgcaactttttatgtataaacatttattttgctgtagagaagacttgtagctttttttttttttttttttttttttacttccctaaaggaacctgtgatgcaaggcggaataaaacccctgattcatgtaagaaggctgatgtagagcagtggttctcagcccagggagcccagtagattcacctggggagctcaaaaccggctgtgtggggctgcagcccaggccaagaaactcagcatctccggcatagtgagaagggggctctgtgttgaggagtacaattctggattcaaatctgtcacctagtgggtatgtgaccttgagcagcttctaaaccgttttgaacataatctcatctgtgacatgaaggtatactcacttctgagggttgtggggggaactaatgacaacaaatgaattgtctctggcacatccgaggccttcaacagataactacatggggcccacgagagtagaatggatgccttgagcatttttccaattcaatatttcagactattcgttccttcagagaggacggaaaagaattcccctgctcatatgccagagcaggatggctgatggtatgggaatgggtggtagagacgttgtttcatagtgtgacttcaccaacagttcatagactagcgccagctttgtgcacaaggtcgatgggcatctcttacttggtgacaacctctagttaaaattgagtggttacaagttagggttcagctctattttcatccatcaaacacctttcacctttttgttgttgttgttgttgaggtggagtctcactctgttaccaggctggagcgcagtggtgcgatctcagctcactgcaacctcagcctcctgggttcaagcgactcctgcctcagcctcccaagtagctgggactacaggcacgtgccaccatgcccagctaagttttgtatttttagtagaggcagggtttcaccgtgttggccaggatggtctcgatctcttgacctcgtgatccacccacctcgacctcctaaagtgctgggattacaggcgtgagccactgcacccaacccacctttcacctttctcagaggaataagaatagtgaccttagcttaagaatagtgaccttagcctaagattcttctggggcatcttcaaatctcttggaggaaatgacttcatgcctggagagcatttggatccgagatggcaagaactgatatgaagccaagctgcgtagactcccagtcatacacaagtcctcagtccctgggggcccatcacatgctgcatgtaggatggctcttccatgcacacttaagcataagatgccacccaatcaagcccctctcttcaaagcatacaacttcaatttccttgttgaaaatcattggcttagaagtctctttggacatctttagctaggaactgggtgagaactttgaaatcttgtctttgtggtcagaagatggcttcttgctaataaatcaaaaggaccctttggaggagataggactagtcaaaggtggcaagcatcctctgcctctctgggttttgagtcagggaggacttggatccaaagtccctgtctctaacttctttttatcctgcaaagcctggcacaatgcctggaaatggtatagagagataacagttactgagtcctaaacctgtgccttccacatctcatttaatcctcacactacaaaacaggtactattattatccctgttttgcagataaagaaacaggcttatggaaattaggtaatcagcatttttaacccagaccaaagcctgaccccagagtttgacaggggtgggaaacatcaggagtttaccaaacctatttatttaccttctggacattcaagtagaccactttttccagactcccttacctctagtatgaccattcaactgaattctgtccaaaggaacataagcagaagtaaccccaggtgtcacttccatgaaaggcccataaacagtgccacctgatgctctctctctcctttttttctggctcctggagaagatggagactaagaaggaagggacccaggtccctgagtatatggcaaacgcacctgacagcaataacttcagcatactctgagaatgaccctgtatggcagacacagctgaatgtgtgttcagagttccaagctcaggaatctgggagtggccagcctggaggttcattctttatctgtgacgaacatctgaaccctcagcctgtcccaaggaccacgagccatacaggggatcatagtcctctgttttgggttaaatgaaggttgtcaggtggaggttgttaaggggagggtgcgaagtggaaatgctattttataaactacatactatttgcaagtggttgtagttctgtctggcccactgccactggaccatccctacatgtaaatttcctctaataataatttatatctcatttgctagctctgggtttcttcttcagcctctcaaacatggttccttccctgttgagattaataggggtctggcatgacactaagtcatcaaactgttacacgaggaaggaaaaagcctcgctgtattaaaccattgagatactggggtttcttgttgcatggcctaactgctgattagcctaaccctaatatgaggaccttcttctgaagcccagtgtccttaatttgaggtcttgacatctttgccaggttcccaactgtaatctaggctcatcacccctcacatacctgactttgaggtttgtccaccttctggacagacctcccaccctggttaggctaagcctactgggttggaccttcagaacatcactgcctacctcttccctccatttatcctgcgtttgaacactgtccagaattgttcaattgctctcagggtgtattagtccatttttgtgctgctgtgaagaaatacctgagactgggtaatgcataaagaaaaagaggtttgatggacttacagttccacatggctgaggaggcctcacaatcctagcagaaggtgaaggaggagcaaaggcacatcttacatggcagcaggtgagagagtatgtgcaggggaactgccccttataaaaccatcagatcttgtgatacttattcactatcacaagaacagcacgggaaaaacctgcccccataattcaattacctcccaccaggtccctcccatgacacaggattgtgggagctacaattcaagacaagatttgggtggggacacagccaaaccatatcacaggggaagcagcctctacttccagatcagcttttctactcattatcctctcccgaatccaaattctctccctggccactcagtgcccccttcatccccagccccagttattcaggtactcacttcaagatgaggcctaccatttcttagagcactggtctttcagtttttttgctcacatgctcccaaaaattctttttaaaccatgaatccacattgcacattataaagttgacaactaaaatttttttaatcacaagtttaaatagttgcaaaggatgtaatagctgctctaagtactggcatttaaaaataagctactacatgactctttttaatatatctgatgaactattaaaaccctagtgatttactaccaaccaacatccatttgaaaaatagagttggaatttgtacaccacttttttttaatcaaaataattatttacattgtgtttcctcactgagtttgtctcttatgtaatatatttttatgcctcaaagtcttatattgtccctccatcgtatttctcagtcataaaacaacagctatagactgagattcttatttttattttcaaaaaaaataaaacaaggctcataaattttttatctttaggtatgagttatggttaccttcattactagcacatgcatgatcaaaaccatgtctatagtaaaattttaaataattattatccatgaaaaataaaattttaacaggactacaaatctaggaagatggataggagtggttgtggataactgataaagaaaaagacttcacagacaacaaacttccttgttgtccctttgtctggtgccacaaacatttttatgcctggaactggagcccagagctagagtaagatttagcctgggtaggaagtatacctatgttttgtaaaacgagagaaatgtgattgtaaaaggagaggaaaggaaaaaaaaaaaaaaaaaccaaccagcgtgaggcctcatcaacaaccactttctcaggcaggtcaattttaagaaaaaatacgtatagaatttgagggcctagaaattcccttaagacttacctatgcaaatatatcccttggatatactttatgcagcactagatgtgtgtcctgctgacttaaaaagcagggcattagagtggggctgatggaggtaaaagagcagaagggttatttggccagttctaacatttttgaaggggctcaaattagaatgtttgatttgtttccaagtgaatatacatattcctaaagatagaatgacaactttttttgtaactttcttctggcatttctatatcttttgaaatgtcccttatagcccctaaaatagaattggcctcatgcctcccataagctctgatggggcacaggatgggtctggggagtccccagaaagaaggtgatggttgaagtgagtgaagataagcaggagcttgtcaggaagagatggagagggatatcccaggtggcaacacagaggtaagagaagagaacagaacactcccacaggcgacagcatggtaggtgcaaagggtatacggtgagcggtaaaaaatgaggtatgaccagaccatgaaattccttgcatgctgctctaaggcctttggactttagcctgaccaggagaatgacatgagcaggtttctatgttaaaaatattatactggcagttaagaggaagatggattgcaaagaattaggaagagtgagggagatttctactttagtctctgagtaagtctctagggatgaggtgggtgcatagattcagagctatctaggaaggtttagcctgcagggtttagtagaaggggtcaaggacagctctaagttccatgatctcggtcgatctatggttcacggtcagggatgcacataagaatcctctcaggagtctgcaaaaacacccatgcctggcaccaccctgtgactcgttgaatttgcagcctctggtgtggaacgccagcccattttccttagaaagctctcttggtttattctactctgcactctctgggtgagaggaatatgggccaggaattgtaggcttcatctttccgttaaagaaatcaaagctcaaagagttctgaaatcagaattcctggagcaaagcatataactagggaaatggtaatgccaggatttgaacccaagttacttggacttcaagccccttcctgttccagacgtgctgatccttgcctacctgcccacttctgcttcctgtttgaccacctgtcctatatattcctgagtgtggctgatgtgttcataatttcagccctgcctccatccacagctgcctgactaggagggacacctggccccagaggagccactccattgaatcagctgatatctaagatagtggctctcaaactttgctgctcattagaatcacctggtaaactttaaaaaaatcctgataccaggtcatatttccattcaactgaatcaaaatgggaggggtggaaatggggaagggggtggaacccaggcatagtttacaattttttctccaggtgattacaattggagcttatgaactatgatcaaagttctccaaatgttgtccacaaattagcagcatcaatatcagctggaagctttgcaggagcgtagactctttggtcctatcttagactcctgaatcacaatctctattttaacaagatctccagatgattcctatgcacattgcagattgcaaagttctcccctaaacaacacagagtgcagtggctcactcctgtaatcccagcacttcgggaggccaaggcaggcggaccacctgaggtcagaagttcaagaccagcctggtcaacacggtgaaagcccgtctctactaaatatacaaaaattaactgggcgtgatgttgggtacctgtaatccgagttacttgggaggctgaggcaggagaatcgcttgaatgtaggaggcagaggttgcagtgagccgagattgcatcattgcactccagcctgggaaacaagagtgaaacctcatctcaaaaaataataataataatacaaaaaattagctgggcgtggtggtgggcacctgtaatcccagctatttgggaggctgaggcaggagaatcccttgaacttgggaggcggaggttgcagtgagctgagactgctccattgcactccagcctgggcaacaagagcaaaattttgtctcaaaaaacaaaaaacataaaacaacaacaacaacaacaaaccgcagaggagcaaaatgagtcagtggaggaatgaatggcagattagtacatgtccttgcaatccttcaaagtccttggatttccttgattcttgcccttcctgatgtctaactgttgcgcttcccttgaattctgaacaatatctagcattataattaccctttcccgccccacctttttttaggctactttgagtaggcttctatctcttgcaactgttagcactaggaaacatatccgagtcacgcagcaccaaagtatgttagcagcagcgaatccttatgggtctgcagcaacctcaattcttgcctcctcaaaagaaagaattcgaccaagggtcataaggcagagggagagacggaagcaagttttacagcaggagtgaaaggttattaaaaagtttagatcagacgggaggctgaggcaggagaatcgcttgaacccaggaggcagaggttgcggtgagccgagattgcaccattgcactccagccctgggggacaagagcaagactttgtctcaaaaaaaaaaaaaaaaggggggggtttagagtagggacaaaaggaagtaagatacacttggaagagggccaagcaggccacttgagagattcaagtgtgtggtttgacctttaccttggggttttatacatcagcatgcttcccaggcgggtggagtgcacctttctcccctgattcttcccttggggtgggctgtccacatgcacagtggcctgccagcacttgggaggagccgcacgatcagtgttttctgaagttgtatgcatgctcactcgaggccttcttcccttatcagtcaagtgttcctagaagaaggtcatatgccagttaaatgccaccattttgcctcttagcgcacatgcttgagcccactcgcccaactcctgagaccgcatagggaagctgctgatcaccagtttcaggtgtttttatctgttgggaggctggccttttccttgtgctggctgaggccaattattattttagagagacagtttaacaactgcctgaccaacacctgatggttgcctgacagtcccggtggtgggggtgggggaggcgggtcctcttctgccctgctcatgtctcactaattacctactgtaacacaaccacaggtgccacaacatacttgctttttaaatttccttttgtttgaatcaaccaatgtgccttgcagaatgcttcgtcagtggagtggggaactgaagtcatcactgattatttggtgcaaggtctcaaaagcgtttctcctgaatgacattttggacaaagcttgccaaagacgggcagcctttgaagaagttcaatcaccatcttcctttccaagttgggcttgaggatgcagtgtgaatagcacaggctttggagttgaattaaaactgggttcgaaccctgtctctggcatccatttatttcagaaacagatatttatggagcgtccactatggagaaggcctttttagctggtaacattatacttaatctttctgaactcagagtcattagtgccatcttaatattgtttgtacttggcaagataagaaatatgaagcatctggaggcctggaatagtagacattcagcaaggatgagtttcttcctttgtactgcccaatcccctctcttctccctggaccttgcaggagatggataaggagcctcttgaaggaagtggctcaggattagtgttctctctctgacctttgaaaattaaatgaataacacaagggacatgacaaaacacaatgacaccatttggggcttttgtcccttaggctagatttacttgtaaggtttctatcctgacctactagaggcagaagatggattaagaaaggagtcttagataatctctcatctactatccttatttcaagatgagaagtcaaatagttgctgttggagactggattctatcctaggtttgcaaacttcccatctgatctcgtgccgtgacatcaatcttgcccccaaacaatcctcatcacatctttatcttccgtccccaaggtaaattgatagtgcaagcatcatgaacttttgtactgcatgatcaccactcgtttccaaaagccatcccaaatttgcacatactcaagtaaaaccaggatccttgctttgctaacatggcttccaattcctgtggcggcaccttctatcccttaaatagactgcagctcttgagtcacttctatgtagaaattctgaagccactactgaaaatgagtcccagggtataaaagactggaaggcagtgcccgttagttgaccccacatccacagccaattgagcactgtgtgattttccttggaagtagatacaatggactccagcatgagtcacaaggcccagctctaatccaggtttcttccccagtcgtcatttctgtccctcctctgtgcagcatcctgtggcctgggaagggggtgagaggaaggaaagaaaaaggagggtccctcatgaactttgcctgtgaagacgatgcactcagggaaggaaacatgattcctgcccatgggatcaggatcccgccacgtctgaacaccgttgtacagcttaacagtccctcatctgtttttcattttggccctttcagcaaccctgtgagggactcagggtacaataaacaaggagacagatttggtgatggcaaaccttacccagggtcagaggggagctgggaggtctgtgctgctgagtgttttgacatcccaaatccccaagggagtatgggctgggaagacctcatgtgtgccatctcaaccccctgcaaatataccccaatgtcctcagctataattaattaattttgaatacattgaaagaagtaaatgcctctgacagttcgctgactccccagcctgcctcctggtgctcctccacccactccctgtgatttgggagggagaagccagggctcagttgattccatctgagatagggctgcctttcctaaaatgagcctcccccacctgtaaccttattctcctcttgctaacttttctgttcatagctttgaagccaaaaaatgagtgtgctttgacgagctttctgtgcctgtcctgcgatgcccctccctgtctccagcccatccgcctcttccctgggcagcattgcagaaactccttcacccttctctcaggccccatcccccctgcagcctccccagaactacagagggaagctgacacaagaaaggcttcatgaaaaggagcccttaaaagaccaaagtgcctttctttcttttgaatgaagatgaatctcagaaatagaggaaacgtcatttaaaagaggagacacaggggagacgtcccccagcctcagggttctcagtgggaaccttggatttgagctatttgtgtaccaagctggtcattctctctctctcaatctttcattctttttctctctcgctcgctctctccctctttttcccctccccctctccttctctccctccccactctctctcattctcccactctctctcccttcctctcatctctcattctgtctccatctctgtcattgtttctctcactctctctctaccttactcctccactccctccctctttttttctctctccccctccctctcccctcacccctctctatctccctccttctctgtttctccctcttccctctgctccctcccttcttacttttctcccctgtgtgcagcagtggtggaggagggggtaggagtgggtgcatttggatgggaggtggaaatgactataggtgaagtgaggatgaagatttgagggcccaggcagatagatgaaaatagaaaaagcccagacaggaccccagacatcctggccccctgaccatgaccctgtaaccacgccacagttttgacacccgttcattaaagtgtctatgcgagcaggaagcccattacccattctcagaaaccttccccaaggcactgtaaggatcacaggataatgtttgggtcagaggatgcttttgatatattccatctggtgaatctcttcattttctagatgagagccttggggtctagagaaggaaagtgacctgccaagtgttacacacagctaaatacaatcccagccaccccctgctccccaggccaggctgttcaatatagcaccctgtctcctctttggctattttctgtggaggatcctaagggcaaagatgatctgattcttgttttgcaggtggaaatatggaggcacaaaaagcctcattgcttcagtctgctgtcttctaggcctaagcagtctttaagtatctaaatcctacccattttcatgttgaatttcatcacttttcctatgaaatgctccttagtttcccagttggaagcagtcactccttcctctgaacccaccccacttccaacccaagcgctccacatgtccctctcttgccatggctaactttctgcagcgcaatttcaatacatttgtccacagctgagtcacttctgcaaagatgccagcatttttgaggacagagatgatgttatggattgcaaacaaacctaatcctaactaattcaatgtgtgatatttattccttaatgtgtttctgtattttcatattctttttgcaaagttgaaaaaacataaaaaagaaaaaaatctaatcttggaatatcgtgatacaataaagcctgccttaccacatagatccttcccctaaaccatgaagcattcctcctccaggaagcatccaagggctgagcagcagggtgggttagcccatagtgtaggcagttcagggtacctcgtctggagcgattttaaaagggatgatatcaatgttctatattattcagcatttttctcttttgcagaagaaaagtttttcaagtttttatcaactacaatagaaattatgaaatttctgctgaaggtattttagtggaattttcaactgcaaagactctggaaagctgctaggagaaatcctgaaatgaaacaaagacatgggcagtattgcaatttctgaaacctattgggaataggatttttatgaatctcttctaaacttgccctcaagtcagtattaaaattactatatgcaaatctgttcctcagtgtgaaagaacatttcaaaattaaaattaattaaaagttctctgatcaactgtgagtgaaaatagcttgataaatctggttgcccagtcaaatatgcctagaagaccaattttgacaaaattattaacaaatttacagaagttcgggcacaaacacaaaatctgtaatatgattatacattattgccacagcctgatatgttggtataagttttttcttttaaaagaagatacactaatgtaattaaaaagtatgagttgtctactgctcttttcctgttttgctatatttacttatttattttactgatatcattgctatttaataatttcaattttttttagattcaggggacatatatgcatggatattgtattagtctgctttcacactgctgataaagacataccaagactaggtaatttataaagaaaaagaggtttgatggactcacagtttcacgtggctggggaggcctcacaatcatggcagaaggcacgtcttacatggtggcagacaagagagaatgagggccaacctaaaaggggtttccccttataaaaccatcagatctcctgagacttattcactaccacaagaacagtatggggtaaaccgcccccagtgattcaattatctcccatcgcgtctctcccacaacatgtgggaattatgggagctacaattcaagatgagatttgggtggggacacagacaaaccatactagatatattgtgtgatgctaaggtttgagatacaaatgatcttgtcacccagataatgagcaagcacccaatagtttttcaacccttgctccccgctccctccctccccacctctagtagtccccagtgtctattgttgccatctttatgacatgattattaatatgacattcaataaagtttttaaaaatcatggttttctggcagtcactattatttgtttcattttatgattgttactgaagataattgtgttgtcaaagaaggggagattaaagactatctgctttcagtatacccctgggtactcccccgcccatcgtgaacacaatttcttcttaatcctctggcaagatctctcactcacccatcgccaacagcattttggaaatgaagctccaataagtctatgtttctggcaagtaagtttgttagtgggggctttcttgttaagttgcaattgtctcagctctgagttcttgtccatttctgcaagtgtgaaaggaggcagatattttccaccctgggaatcctctgtaatatcatagtgggtttctccacctcagcaatgttgatattttgggccagataagtcttcattgttggggctgtcctgtgcattgtgggatatttagcaacacccctaaatatgattactaaatagcaactaaatgccagtagcaccccttctcctctgttgtgacaactgaaattgccacaaaaaattgccccagctgagcatcactgtattagactgagactgcagtttgtagttgaaatggccctagagcagaccttcgtctatattgagcttgggcaagtctcctactattgctgagcccccattttctgcatctgtaaagttagactaacatctatcttgattcaatgtgaaattcagaaaaataacatgtgaaaatgacttgtacactctaaatttatttgcaaatatgcaaggtcattaccaagtggtcaaaaactttatactacaactgagttgtgaaaaaaatgcagctcttaaaatgatctaatcttgatttcatccttatttgagttcattaaaaacttaatcagccagttacatataatttcttcttttccagcttaaagcaggatctttcactcaatttgatatctttgggttaagaattcaattcactcaaagtacaaatatccaggacagtttctctcaagatcttttcaccttctctttctcaagattgtggctgggtacaggtagaactcacagattctatggcaatgaggtggggagtctcagattcccatgctggcctcaggtctgtgctggtctgtgctgatctgtgggctgttctggtctggttcccgcatatttgcctgggaaggcaaatcccaccttgtccttcagagccttgtgtgtgatccctgacctggactccagaggtgaggtccctgccccctgcagcccccttatctacagcctgggggctgttttggttcttcatttctttcagcctctgcatctccctgggggcctcagatgtgttccctgcaccaagctgaaatcagcaaatctcggccagttggacctccagcccactcacgtggaccttcctcagccctggtagcctgctgccattgtgctgtgccagatgctgtgctggctaaccatgggctgtttccaagacctttctatttcccaggtgtaagtgatcctatttccttatctggaagttttgagactcctgcccaatttctttcctctcctcctacccacaatgaccctgtgtttgagttagggggtggaaacaccccatctcttatctcttgccctgtcatctctctcttctgagcccccttcgtcagacctgcaggtgcgtttccccacctctttcctgttgagtaggaagtccccttagcatcatatgttccttcttgcctactctaggacattctcctccccagtagcaatgtggcagaggggctgccagagaagaaacaaatttaccagcatgagaaaatacattgagatgcatctcacaagtattagcagagttacagcaacggttcagggccaggtgaagggaaggaagagtcccttgaaaatgaaacgtgtgccccaaactatcttcaaacttcagccaactggcctcccacacagaaatgaactcctgcccttgaaaagcaaaacccatcctcagaatgtctcttaattaagccttttaaatctccttgcccttcttcgttttccttccttctcttcttttcctccttgtttttccattgtcatctcttttctatctggactgagtttcctgtgtggattgctcttgggagttgtgccctggaaagaggcccttgggttagcagagggctccttgcctgctttcccgtcttttctggagaaccaggctgacacagctgctctggcaaccagtgtttccaagaagagccaccaagcatgcggagcctctgctgagagagctaggtcaacatcccctcatggaaaagccatcccagcatgtttctttagaactagcaaggagggccaaggcagactccagggttcttcaccagcctaagatgccttgggaagcaattgccagtggttccatcaacagcttcctttgaaaattcagacccttcaacctgttcagtgccaactatgcattcctggttgcacccccaaactcttgctacatgcatatgggtgcatgcgtgcacacacagggacacacacatgcacacacggacacacctcctcttggactgttgaaaaggctgggtttatataataaaacttcctctgccacatagacaaaaataaccctggcatccctttctggatggattttaattaggaaagacacagcatttaaattatgcttattactttcagttgcttgtacaggctgtggatttcggaaaaggcaatgggaatcatgtgagctggatttctctaacaggatgactctgagagggaaaaattgccaagggcattttaaatctttctcctcttctagacagcctggctgaggaaaaaggtccatgttctaacatcattatcactaacatctctgagtgcctactccatgccagaaccctgggtaacaagcattttatttatttgttcatttttttttttttttttgagacagagtctcgctctgtcacccaggctggagtgcagtggcacgatctcagctcactgcaagccccacctcccgagttcaggtaattctcctgcctcagcctcctgagtagctgggattacaagcctgtgccacctcctctggctaatttttgtatttttagtagagacagggttttgcaatgtcggccagactggtctcgaactcctggcctcaagtaatctgcccaccgtggcctcccaaagtgctgagattacaagcgtgagccacctcacctggcctaacaagctttttaaatgccttaccttaattagcctcaagaattcgagtttgaccaatagaccccattggggactatccctttctaggggattccagggacatacccttattatgaatcagggggttcctccctgaagctacaatagtgactggctgctaacagcatgtatgcaatgaattgatgtattaggttggtgcgaaagtaattgtggtttttgcctttgaaagtaatagcaaaaaccgcgattacttttgcaccaacctatacaagcaaatgaatgactgaatgtggtgggtgtgctcagaatgaatcagatgcagaagaattctgtgtgggaatagagttctagccacagaccttgctgccgggagtactagatagatagtatatgactccattctccaatgagtggctttttggggagatttaaaacttggaagaacatagaaaatttctctcccctgcttctctctcccaaatctttataggcatcttaatgaggataaactttcaggccacaactatgattttaggcaattatttagcccatctggctttccatttcttctgcggctataacaccaatatctaccacagagagttttctaacaatgattaaagatccaatatgtaggccgggcgtggtggctcacgcctgtaatcccagcattttgggaggccgaggtgggtggatcacgaggtcaggagatcaagaccatcctggctaacatggtgaaaccccatctctactaaaaatacaaaaaattagctgggcgtgatggtgggcgcctgtagtcccagctactcgggaggctgaggcaggagaatggcgtgaaaccgggaggcagagcttgcagtgagccgagattgcaccactgcactccagcctaggcgacagagcgagactccgtctccaaaaaaaaaagatccaatatgtagctaagcagaccttcttccccattttattgctaaagaatttggggctcaggtatattaaatgacctttagcatacttactcacttgatcattcaacaacttattgatgatctgttatgcttacaccctattctagatgctctagtgattgggacagtcgatgaggggaacagggaaggcatgtaacaaactaacaaaataatttcaaattacaataaataaataccatgaaaagagtaaaagaaagcagaataaaaaagctgtgatggagtaagtggggaagctctagatgaaatgatcagaaaagacctctttaaaaagaagaaaaaacagttatctttgaaactaagccctgacttgtaagaggaaggagccatgcctaggtcttgggggaatatagttcagtcaacaaaaactgcagatgcaaaagtcctgaggcagaaatgacattcctgtgatgaagggacagacagaaggtcagagagcttagacagtgaggagaggggttcaggatagggctagagaggtaggcagacgtcggaatatggaaggtattacaggattagtcgaggagtttggatttcatcctaagtgcagcaaaactatttgaaaatttttagcaggggagtggcatgctctgatttacattttaaaaagatccctctggctgccatatggagaataaattatgatgaggtatacatggaagttaagtgaaggcagaggtgatggtagccaggactacggggtagcaacacatggaaaggcttggacccagggcacatgtaaggaaaccaggactagaacccagacctctatagcatctgcctctctggcctgccatgtgccatataaatattcttgcttttctttttttaaataaatttcccatttaacaatgctttctgcagagccataagttcactggaaactgctcaaattgacactcaagcaagaatagcatgcctgtgtgataataatgcattcatcagcattcctgagtccactccaggagtgctggatgcgaaaggggcccaagagagtccccccaacaagggcaggaaaaggaatgttggtaggactccagggctaatagaaggtgtggggcttctcatcccagaaggaggaggtctgaggaatacatactcggggttatatccagaaaggaagaggcccattcccacttaagttcaacaagcttgctagcagcacaaggagagaggccatggctggagggtcgtggagaaaggagttcggtgggagcctgggccttcagattgactgagagggaaagcgccctctactttttaaacttgcaaggaaactcttaaaaactcctctcttttcagcagtttgtgactttcatgtgaggaggagaagttacaaacatttccaggtattctgttcctcaaatgccctgtgtttctccatcattgtattttggacatcttattttaaggctttttttgttttgtttttgtggatctgtctcctccatgggagagtggcttccttggaaggtgtcttcattacttttgcatccttgggccacatcaaaggacctagcatacagttggcagtcaaaaacttgctcaacagttagatgtatgatatccctaaatgtacagaaccaaagaatcatcctaaattagattataaggctgagtgcagtggctctcgcctgtaatcccagcattttgggaggccaaggctggtgaatcacttgaggccaggagtttgacaccagcctggccaacaaggccaaaactggtctctactaaaaatacaaaaattagccgggtgtagtggcacacacctgtaatctcagctacttgggaggctgaggcaggagaattgcttgagtctgggaggtggaggtgagccaagatcaccccactgcactccagactgagcaacagagtgagactctgtctcaaaaagaaacaaaaaaagataaattagattataaatcaaccagtccaaggattcttaatctttattagtcatagacgcttttgagaaaatgatgacagtcagagacactttccacgggaaaaattcacatatgaaaatattttaatacttttttttatagaaaagaaaattgaagaccagaagataggagtgacttaaccaaagccaccaactttgtctgtgacagtcattcctggaacccagatgttctgatctccaatcctgtccccttctactatgcctgggcagagtgagctagaatgtcacatagagggtacaaagataacaatcagaactataccaggaactggccctggggagaattcttagaaaacagatgattgctgagataataagctactagcctgggcttatgagatcatgctatgcctatcctaggcagtccaggaagccctaaaggtattgaagtcttagaaattagtgactactcaattgtctctgagagggcagcaataataccaagtgttgcgttcaggaattcaaacctaatcgtaatccctaattagctcatttttaacgccctgggcatgaacaccttgaagcaacaacactctgtccatgcaaaggttatttagggcaaagtcccaagaagaggaggacttggatgctcttcacagagcctgccatcctcacatgtctaaagcagaagaaaacacagatttctgctaggtttatcccactacccctgcttattttctgacagagggttggggagaggggtgtcgaggggaatgtgatatgagaagagagggtatcagaacaccattctctaacaagtctgtgggctttacagcttgcaatatacttcttcaatcagttatcttttagaatcctccagcaaccctctaaggtgggctgggcaatgatttctacccccattttatggctgaaggaacttgagatgagcaaagagacacttgttcccagtaacatcctgtttctcattcccgttggttggttgggcatcctgtaggtgaagagtactaggaggtacacaaagaagtcattatgaagggctgtcaacagctcattcaggtgattgggttgtggggttaggaactgggtgacagggtcatgataagtctgagtaacctgcttcttgtctctcttctactttcccaattcaaaattcacctagatagtgattcaagctatttggattaggggtctttttttgagaatctaaacagtgatggctactctctcttcagtaaagtacttacagtgggttgaatcatgtcctcccacaatccatgtccatccagaacctcagaatgtgaccttacttgaaaataaactctttggagatgtaatgtgttaagatgaggtcatactggattaggatgggccctgaatccaatgactgatgtccctataagaagaggagaagacatacagacacagaagagatagatacacagagagagaagaaagccgtgtgaagatagagacagattggagtaaggcagctacaacccaagaatgccaaggagtgctggaagtcaccagaatctaggaagagccaaggaaagattccctcctaaaccttcagagggatggtggccctgttgacatattgatttcagacttctggcctccagaattatgagagactacattttttgttgttttaagccaccgagtttacggtgtattgttacagcggctctaagaaacaagtgtaggccgggagtggtggctcacacctgtaattcctgcactttgggaggccgagactggcggatcgcctaaggtccggagatcgagaccagcctgaccaacatggtgaaaccctgtctctactaaaaatacaaaaattagctgggtgtggtggcagacgcctgtagtcccagctactcgggaggctgaggcaggaggatcacttgaacctgggaggcagaggttgcagtgagccaagatggcaccgctgcactccagcctgggcaacagagagagactccatctcaaaaaaaaaaaaaaaaaagaagaaaagaaagaaaagagatgtgtatggtactattaggttggtgcaaaagtaattgcagtttttgccataataaatatctcctctccatacccaactctgggaaatcaaaccactttccattttccgaacattttatgccttcttatgctatggtgtccttccctggtgacactctctgcttacaatgccctcttccctcccctcctgtccattcctactcccacttcagtctaagttcaggtagcctttctttcagagaccttccctgaccacttcccactcccaggcagggctaaatgctctctcttctgtgttcccacagaaccctttaatataatgattatcacatttacccttgtctatttaacctccactgtgaagcacaatgtatgattgaacagatgcttatttactgagcaaagaagcatcataggtaccaggtgggttgagggcaatgagctctcccatggcaggccagcagggagagctccatggagattgcagctgttgggttgtggccactgcagcaccaggaggcaaacgcatagtcattacaatgcagaaaggcccctgaccatatcttcacagctatttcacatgtgctttactgccttgcagactgacacccaaacttcttcctcaggtctcttctctagatcataacatatgttatagaagactactttcttctacatgccctatggcctaggaatccataggcataggtcctagacctggctctgatgtgaactatctgtgtgatctaaatgatgtaaacatgtttatttgagccctctgggcctcagagtcttcatccgcaaactgaggagctagaagctaaaattctagctctgagagtctcctctctgggacgccacagagaaaaggaatgtgggtgtcctgttaaagcaatattcctatgtttttgttttccctactgtttaaatgataccagaacctttccttcttcacttgtacctccaagctccatccctttcaccatgtgacaatttctccactggttctaatggctgagaaggccattacattgaaggaaaagggcagcattccccacaactgtcttgaccattttctttccttgagaaccctaagtctgggtcctcaggaaaacagaacaaaagaaaacacactaaaaaaaaaggattgccattaaacaccagatgtccagtagggagagcctttaaaccaaaacagctgcttggacaatgcttgcgaggcatcctttccctccagcctcctcatacgacaaagttcctgtgcctttcagccagagggaaacatcttcaccccagtgtgaaaccccatttaaagctgccttgctgtcaatgtgtggggacagtccagatactgtcacctgcttcccttatgtacaggctcccactcctctccagccccccaggcacttggaaaatctttcttcagtcttgttcagctagaaagttacctctcccatgttgctcttattcttagactcactctttcctctgtgctgtagatgagaacagctaacatttatatatctattgtgtatccaccatgtgctatagtctcttaagtctcagaactaggaatagctgggtttcttcttcagaactcctctgcatttatcttggcactatgaatcatctaacgaaccatatttcccttctttattgccttggatgctaagaagctcaaagccaaatttgtgacctaatcttatgatgttatctaagagcctagtgttatctctgactttttcttatttttcctgcctttgctttttctacacgctaattctattatttgctttaatgaaagccattgggctgtttctgtttgtttgtttgtggtaggtaagcacaaatcctgtttgaaatgggtcataatacaaataaaaagtaaaaggtatcgcatatgtgtctctgcatattcatactaatcttgcactgttgaggcaagtggggctcagaaaggttacataacttatttaagatcatgcaatttttaagtcgaagagctaggagtcaaatctgttttcatctgacttcaaagctcaggctcttgttagtataattgcttacacttagtaagcacttactgtgtgccaggttttgtgttgagtatcctatgtatgttatctcatttaacctcacagcaatcctatgaagcagctactgttattacaaccatttcatagatgaagaaagtgagatttagagaggccaaataatttgtccaaggtcacccacctaatgctaacattgagattcaaacctacagggcctgacctttaagtctctacactcttatagtgggggtaaatgtacaaaaaaccagattcttaattaagggttgtttgacttcttttgaatgcccagctgcatagttatatcacaaagccttatcatctgaaaaatcctattggagaaatgggtgtctggctagaaataggtatttctgggtttcacagttcttcatggagcagatggattagaaacacaaagtctgtgtgcaacactggattttaaatgccagcctgagtactaagagagaggaagattacctagcgcccgaagagtggaaataaaagccatagggaagggcggcactgctcacgggcgccatctggtagtaaagatgggaaattgctctgagaaaaaaatggacgtgcgaaatgaaattcccctcctgggcctcttgcatgttgagtccttgaggtataactttttccttcatacaaatcctgcaagagagatattattatccttattttatcaatgaggaacttaaaactcaaagatatcaagtaacttgccaagggatttgactacagtctacttagcctccccaaatctttatttccattatactgtgcaaactctcaaaagtcgtatttctgggtagctcctgccttcttttacccctcaggattggaatcacagatgctccacgcttcattggaaccgtcctgagacagacaggaaacatgtcagcagtgggtctcaatagggttagtgccctctgttccagcatagttggcctagttcactgggcaggactcctgtcttaggcactggatctgaagctccagctctgaatttcagtcaccttggctgggctttattatcctacagcatgctcacccaattccctctcctggggggtggggagcgctagatcctccctactccatccactagttactgactgggtgctgtcatgattacaaaaatagccagccctgaaccaccccatatccctgtgagtgtggtttggaactccaatgtggttgattttccacatctcaccaacagctatctgttagctgcccagggtgcccatattggaacccaccagtgtagctggttttctcccagactatgttcttcctggccgttccttcaccagggacaagattgctaaggttgcaaattgaattctcacacaattactattgccctttgagaaatgtgtggggaaatgaaagagagcctagaaaattgaggatagaaagatgtctgccccacttttcaaaaacaatgatggatccctgatacttcagttagtataatattttgtagaagcaaatgatgtgtgaagagtaaagaaatagtaaacagtaagagttgggaaaattcactatgaataaatcattagaaaccaactttcctttttagaaaaagttgtcttactggtaagattttgtcatgttagagatacaatttgaaaatagacacatatttcaaaacaagttaatggaacaaatgtgcccctggaggggatatccagtagaggaggaattcgagatcagcctggccaacatggtaaaaccctgtctctactaaaaatacaaaaattagctgggaacggtagtgtgagcccgtagtcttagctacttcggaggctgaggcacaagaatcacttgagcctgggaggcagagactgcagtgagccaagatcacaccactgcaatcccacctgagtgaaagagcaagattctgacttaaaataaataaataaataaataaataaataaataaacccaaaaagctgatctatgcactgatttgaccagtaatgttatctatgacttaaaagaaacttaaaaaaaaatcttattgatgtcaggattcaaaataatttatcctggaactataacaaaaattaagaaaatgaaatttagttagcaaaaatgaaatgtcttaaacctacttaaaacaatcaaccacaagaaggagtaaccagtggttgataacaaaaaactcagggattctggtgactacaagtgaagtatgagtgagcaaggtgatgtggttacttagaaaatactgcaactgagggttctgacattcacagtggcagagtaagaacctctgcaaaatctgtttctccataaaagcaatgagacattggccaaaaattgttataatcaacttctcagaactctggaaattaaccaaagatttgcaacaatacaaggagtaattattcagggaaaatgattgaatctcaataagaacaaagagccctgtggcattttaacttgtcctactcccatccccctctcctcagcatcacaagagccttgaaaaccagcagcctcacaaccatggtagtggtgaaaatcagcatcctagcagccactagagaaagcagaacatgtttggagcaccctaaaagcctcatctttagagaattgtcactatttgacctgtctggtaactccctggaaacctctactctcagagcttgtctttatgtaaccagactcagagctggctcaatgtaaatggcctggaacgtttgttgaaatcaacaatcaccggtaattgttaaacattacatctgcctgaagcagagaaaacatttgggaaaaacaagaggctgacagaagtctttaaaggaaaacctgacacataaactgcccacaaaggacttttaaaagttccagggtatttctgggaatctagaaggccatacacatgttcaggtttatgcccaggaaagatctgagaaggccctaatctcttgcctttggtggaccttgaggctttgcagaaataggaagtgaaggctaagacagcattatagactgcctgccagagcactgaatacacattgcaacacatagagagagccctttggcaaaagctaagaaacttattaatgccaggcacttagggaaatttgtgtccaatcattactagccactaaactaactaagtggagacttcacagagttaatttataaaagtcacgatataagcaaacaatacaacaacaaaaacaaacagcaacaataacaagctctggagaagaaaggaatctgatttccagggttgccacattatatcatttaaaatatccagtcttcaataaaaaattatgagacatggaaggaaaggacagcatggcccatatacagagaaaaaggtacttaatggaaactttctctgaggaaacccagatgttagatttactagacaaaggatttaaatcaactactatcaatatgcttacagacctaaagaaaaccaggtgtaaagaataaaataaaggccagtcatggtggctagtgcctgtaatcccagcactttgggaggccaaggcaggaggatcacttgagctcagcagtttgagaccagcctgggcaacatagcaagaccgtgtctctaaaaaaacaaaaacaaaaattagccaggcgtgatggtgcacacctgtggtcccagctactggttgaggctgagatggaagggtcatttgagcctaggaggtcaacactgcaatgagttatgatctcaccactgcacaccagcctgggtaacagagtgagatcctgtctcaaataaataaataaatataaataaaatcaaagtattattttaaatgagaacatgcttcaccaaatgtagaatattaataaagctatagaatttataagaaggtaataaaatagaggctctagagttgaaaagtacaatagctgaaatgagaaattcaatggcagacttgagtgagcggaaagaacgaatcaatgaatttgaagatgggctgcttgcaattatccagtctgagaacagaaagtaaaagaattgagaaaaacaaagcttcagagacctgtgagacaccatcaagctcaccaacatacacataatgatagttccagaagaaacaagagaaaaagggggaagaaagaatatctgaggaaataatggccaaaaacttcccagatttgatgaaaaacatttatctgcacatctaggaagctcaataaactctaagtaggataaatgtaagagagctacacctagacacattaaaatcaaactgtcaaatgccaaagacggagaatcttgaaagcagcaaaagagaagcaactcattatgtacaagtgatcttcaataatattaacaactgatttctcatcaggaaccatggaggccttattcagagtacagaaagaaaaagaggcctcaagaggattgtttgaggccaggagctcaagactagcctggaaaacatagtgaggccctatgtctattcttctttttttaattagccaggggtggtgatgcatgcccatagtcctaagctacttgggaaactggggcaggagaatcacttcagcccaggaagtgattcaagtttacaaggagctatgatcatgatgctgcactccagccttggcaatgacgtgaaatcctgtctcttaaaaaaaaaaaaaaaaaatgaattctgtattcaccaaaaacactatccttcaaaaataaacgagaaaaccacacattgacaggtttttcaaaaaaaaaaaaaaaaaaagaatgtattaccagcagacctgccctgtaagaaatactaccaagagtccttcaggctgacaggaaagaagacttgctcaaatactcatgaagaaaaaataaggaacatgagtaaaagtaactacatagataaatataaaatgtagtatgaatgtacttttgtttgtaattcttttctttttctatgtgatttataagacatctctataaaacaatgactataaaactgtgttgatggatttataatgtataattataacagtaatagcacaaaggaggggggagaaaatggagatctgtagacacagttttttgtatactattgaaattaaattgggattaatccaaattagattgttaaaaattaaagtgttgaatgtaatctccagagcagccactaagaaaataactaaaaatatatatagtataagacatgacatgggaaatataaatggtacactagaaaatatctgtgtaacacaaaacaaggcaacaattgaagaacagaaaaataaaaaagataggctgtatagaaaacaaatagcaaaatggcctaagtaaattctaccttatcagtaattatattaaatataagtagattaaacactccaatcaaaaggcagagattggcagaatgaatttaaaaaaactaaaaatcacaggatccaactacatgctgtctgcaagaggcaaactgcagattcaaagacataaacaaattgaaagtaaaaagatagaaaaagatatatcatgcacacccaaagtgctcaggttacagatgtgagccaccatacccggttggaaagaaaaactttagctggtctgataggggtcaaaaatatttttgaaagggcttctataaaaagaagtgcaattttatctagctctcaaagatggagataggtagtacccgtgggtacaagtgacagggagacacattttggcttaatatgtgattgcctataaatgaaagaggtgcctgctcttgggattgtgcaaaaggttctctatcagagataccctagatagaaactggatgaggagggtagattacaggatacaaagtcaacacttttctgcaagtcactgagcagaaatggtatttaactacacagctatctttcctctcctgcagttcttttttttctgaatgagggaagaatgaccttgataatggttatttttatttctttttttcttcattatttttagctagtaattttaccatttagggtccaattatagaccttagaaaccactgcagacggttttaaaaactaagaaattattcccaggtattaaatgaattactaatggttgggaaggtccaaggatcaggttcctagttaagtttctaagaacagctcccagcccctaagatcactctgcttaggagagctgctgatgttactgccagaaaccaaatcaggaagctgctaactatagagccacatcactgccataacttcttgaaagaagacttagtgcaggagattcttagctggaccttggtgaattggtaagatttgtgtgacattagacagtcaaactgtctgaaccttagtttgcttatctggaatattgggataattttacctgccataactactttatgaagtttctatgcagattcaatgagataaagtatgaaagtgctttgaaatcagttaatctctctctgtatttttttctattattcagtacctgatagacagtaatcacccaataaatatttgctgaatttaatggaataaagtgtaatcctcaaactaagatattgacctgagaatgtacaataatgctgtgtacaaaaggcttcctaactgcattcaagttggtagatgtctattgactagaaatgtgaaataggataggattgttagaggggcctcaaatatggatggtctggaaaacaggcaaagaagcttagaatccataaataccaagcataagagctttggagtcagacagatgtcagtttaagccctggctctgccacttcctagttagctatttaatcccaggcaagtaatgtgtgtgtgtgtgtgtgtgtgtgtgtgcacacgcgtgcaggtgtgtataaacatacatatatgtatttcaaactgatatatataatcagttgctagatgctcttcattctttctttttctcattttcacaaaagctaaaaaatcctaacaacacagtggcttcccaggtccatgagaagactgggttatttccaggaggggagaggcaaatatgaattataactaaagacaagaaacacgattaatgccacaaattgggctcagaccctgatcctagactagcatgaagcaatggacagaatgagaagaaaaacaggagaaatactgcaaagaaggatgcaaagtgaaaaggatgcagctgtgactgagccgagcgtgccctgaggcagctggggtgaaggcgttggatcatccttctgcctcattttctccatcctcacaaccatcctttatcctgggtcttcatccattcaccttactgtttgaaccattagagtgggtttcaaactgtattacacagagatgcacccaagattcttccaacattctattccgttttcaaaaactaccattttctggactgttagaaggtgagaaagcagcttagtagatggagacccaggcttgctactcttgtttcagccagaacaacagcttcatttttatttctgttaactattgtgatttctcttaaaatttaattatattaggaatttctgctttaatagtgtttgacttcacatcaatctgtttcaacattgccatgggcatccctggcctttgacgctcttctttcctgcactccactctaaataaatcgagctaaattcattctggctggccgcagtggctcatacctgtaatcctagcactttgggaggccgaggcaggtggatcacttgaggtcaggagttcgagaccagcttagtcaacgtggcaaaaccccgtctctactaaaaatgtaaaaattagccaggtgtggtggtgtgttcctgtaatgccagctattcaggtggctgaggcagaagaatttatcgaacctgggagacaggttgctgtgagctgagatcgcaggactgcactccagcctgggtgacagagtgagaccttgtctcaaaaaaaaataaaataaaataaaaatcaatcaatcaatcatgctaaattcattcttcattaagttgtcctctccctgctccagattgtctgttgactttttatcatcctctggacatgggctaaatcctcagccaagcctctggggaactcttcaataaaaacaaaaggaatggcataatgatgccttaagctattgagaatccttagcacatggcagacactcaataagtaaatgccaacttactacagttgattgctccttaagggagcctttgaatcccctcaactcatggaacagtgccttgtacacaggaaagtaccttgcaaatcaagagacactccccctttcacagcatagttccttttgcttagctaagcttccaagttggggaaatggcttggtgatgtttaggaaggatcctgaatttccatcttctgtaggaaatggtatggcaatgtttataacatgccttcaacctctttcttttgttttctgggaaaatacctacctctggctggcttacaaatgtaaacgtgagcctacaaatgtaactgctagagcgacctaactgaatccctctagtccttcatcattatacatggttcttggtgcccccttgtggcaatctgtcatcatgcagggttaccaagatgaacatgacagccatcctttaggggatgcctaactctgagacaaataccatgctaggcattttcaatggattagctcatttactctcaccacaatcccctgaggtagctactattagtttaataacatgtgctaagtaacacagctaacaagtggcagactagagacttgaattcaggctggttacactggagcttgtgcttttcacttctatattaggtgcaaagagatattatggtgaatatataaagaggaattaagaggtgggacttctgggagaatggaataacaagtttggtggactctttccccagcaaaacaacaatcgaattagagaaaattatttaaaatatccatcatttaaagtgtctggaaagtgttgtaagggccatacagcaaataagaaacattaattcaagaaaatctttaaaatttcaatcataatagcaagagtctgtggcatttgagctgcgatttgcccattaatcttcttccttattatggaaactctacccagtatatgagcagccaagacagggctccatctctctctacatcctagtttgaggctatggtttcaccctaaaaaagacaggatgctagtatttctcactccactaagccccagtctgcagaagttctgttccacatgagtatgccaagaagtgtcatccaacccccagttataaggtggaagctctgctgtaggcacagcaagtcaagaatactggaggactgatttcctacacctcagttcacttgcaagtgagaggttacatgctgggagaggtaagatgagaagataaggggtctccacactccccaaccccagtacctagtcatggagcagggatgtcactctggggaaagaggatctctgttccagcttcagtgcagtggcacaggtgctctacctagtgggaaaggcaggccacaaagagcaaaacaccatagctctgcctgaggagactgactttatttggaacaaagggtgaactccatacgtaagagcattcttaaaaataatggtaatcttgttgggagagcaatgaagaggcagctggtatgtgcgtatacaaacaaaatagcagagtattcagaagtttaatagggagaccacggaaagagacagccaagaagagcccttctatgcatacagtcaagtccaatcagaaaggctgtgctaggctgcactcacttgggaaaaatcagagcaggatgtggggcagatttcatagcatttctcaagtcacccacaggcccatcaacatagggtggaaattttattggtaaaaagggcataagcacaacttctgattaacaactgactgaacaatatgttattctggcgcaggagtgactccaagacagccaagcttaaaaataaaatcatagtcatccctgaaagtctggaagactatgtgcatacccaaggctgcatcctccaagaagcaatcagagagagaaccaccaggctgctagttcctaggtgaacacgggagaaaagtagtaagctccctgaactgtgataagagcctccacatcacacatatcatttccgacagtaaagggtaaaaaaacctaacagactaaggacactgaggcataacctttgactagtaaatggcttatgctgacctagagaaaacccctatctagccaggctaaaagataaaaataagggggccaggtttggtggctcatgcctgtaatcccagcactttgggaggcgaagtggcagggcgggggcggcagatcccctgaagtcaggagttcgagaccagcctggccaacatggtgaaacaccatctctacaaaagcacaaaaattagctgggcatgatggcgagtggctgtaatcccagctactcgggaggctgagctggaagaatcacttgaacatgggaagcagaagttgcaatgagccaagatcgtgccattgcactccagcctgggcgagaaagagtgagactctgtcaggaaaaaaaaaaaaaaaaagataagaataagggaaaaaaatctaagcagggacattagaagctgcacactgcaatagactttgaagaactacttaagcttagctattaaacaaatgacgaaggaaacaacaagccccagagaatcagcattcagaattgctatgatatgtgatctaaaatgtccagttttcagtaaaaagttgtgagacattaaaagaaacagggaaatatgacccataaaagcaggcaacagaaacagccttagagaaggcccagatgttgaacttagcagacaaagacttcaaagtagttattataaataagttctaagaaaacatgcataaaaataaaggtatgagaagacttcaaaaagttcatggaaagtggaagcaacaaacagtaaaaataagaaatataaattttatttcccaacataaattccatcaaggtcaaaacaattttgtaagtgatgataccagcagtttagtccatccctaaagaactgagggtcctgggaatttaaccatgtcagtgcagtcttttttatattattaactgaataaaaatgggtgtcctttaaagattgtttaaaattaggtggggaaaagaagtcagaagtagccaaatcagaactggagggcgtatgcttaaagatttcccatttaaacttacaaaatttcacttgtttgttgagaggaataagcaggagctttgtggcagaggaggactctatgatgaagctttcctaggcatttttctgccaaagctttggctaactttctcaaaacactctcataataggtagatgttattgttctttgatcttacagaaagccaagaagcaaaatgctttgagcatcccaaaacacttttgccattatctttgctcttaactagcccacattttctttttcttttctcttctcttttttttcttttttttttttttttttgagctggagtcttgctctgatgctcaggctggagtgcagtggtgcaatcttggctcactgcaacctccgcctcccggattcaagcagttctcctgcctcaacctcccaagtagctggggttacaggtgctcaacaccatacctggctaatttttacatttttagtagaaacaggattttgccacattggccaggctggcctcgaactcctgacctcaggtgatctgcccacctcgggctcccaaagtgctgggattgcaggattgaggctctgcgcccaacccccatgttttctttgactgccacttccacctcttggtagccattgctttaattctgctttgacttcaagatcatactggtaaagccatgttttatctccttttacagttcttcgaagaaatgctttaggatcttgatcccacttatttaaaatttccattgaaagctctgctcttgtctgcagctaacctgggtgaaatggttctggcacccataaagtagaaaatttgcttaatttaaaatttgcagtcagaagtttttaagataaactaattgaggtatttatggtgttggtgttggctattgttcctgctgttaattatcagtcctctttaattagggcatgaacaatattaatttttttctttacaaattgatgttcatgggctgctgctgcaggcttcatcttcaacatagtcttatcccttcttaaaaagaattatccatttgtaaactgctgatttctgtatttatttatttgtaaaccactgatttctttggggcattgtctccataaactttttgtaaagcatcagtgatttcaccattcttccacccaagattcaccataaatttgatgtttgttctagcttcagtttagcagaatttgtatttctctgatgggactcttttccaactgatgtcttatccttcctattgtctcaaactagatcgtgttcagacatgttataacaagttagtgtgagtttattttggtgcaaaaaagtttgaaattcatgcatagttttttatagtatgcattttctatgaattttttgaagagctctcatgtggtaaaaatatctcatcaaatacagaagatcagtaaagagaaattacacacacacacacacacacacacatacacacagctgaaaggaaattctggagttaaaaagtacagtagtgaaaatgaataattcactagagggttcaatagcagacttgaactgtcagaagaaagaattggcaaacttgaagatagagtgatagagattatgcaatctgataaagagagaggaaaaagaattaagaaaaacaaacagagcctcagagacatgtggaatgccatgaaatacaccaacatacatgtaatgagagcaccaaaaggagaggagagagagaaagggacaaaaatattacagaaattatggctaaaaatttcccaacattgatgaaaaatattgatctatccattcaagaagctcaacaaatgccaaataagataaacacaaaaagacccacactcaaacacttcctagttaaatgctgagagacaaataatcttgaaaacagtaagaagaacacctcatcacatacaaaagaaatccagtaagatgtaaacgagcttctcatcagaaacagtggagcccagaaagcaggaagaagatatagtgtgctgaaataaaaatctattaatcaaggatgtaaaatggtacaactgttttggaaaattatttgacagttattcaaaaagttaagcatagtgttactacatgacctgaaaattccactcctaactatatacccaagagaaatgaaaacttatttctatacaaaatacataatgttcatagcagcattattccttatagccaaaaagtggaaacaagctaaacatccatcaatgagtgaatgaataaacaaaagtcatatatccatacaacagaatagtatttggcaataaaaagcaataaagtactaatatatactacaacatgataaaccttaaaaatattatgctaagtgggagacaccagtcacaaaagaccatatattgtatgaatctacttatatgaaatgtccaaaataggcaaacctatagagacagagagtagattcgtggttgcctagaaatggggtgtggtaggatgagaaaatgactgctaatgggtatgggatttgttttgcaggagggaatgaaaatattctaaaattagattgtgatgatggtatactgtgaatatactaaaaaacattgagttatttacttttagtggacaaattgcatgatatttgaatcttatctcaataaagctatttttaaagataaattagatacaatcatcacccttgagaagcttacaagtacaatacgccttcagcaatctttgtgaggtaaacaaaaaatcaaggcataagctatagcataagttctgtgggggaaagcatgaagaattctaaactcctgataagctttcagaacaaagtcctcttttaattgaaaataccttgtactttgaataaactatccctactgcgtttgggtagaggccaatttagaagagacaatacaaaagattgggggtaaggggaaggacctggagtggaatagctggagtcctgctgtaacaatggactctcagaaatggcaatagtaataggcagatgctaggcagacagtaatacttacactaggtaatggagcatgctcttttagtatggctgctgtccacaggacttccaaataggcagctggctatacaagtctcaaaatcaaaggagagttctcagccagggatatagtttattagagtgtcagaatacaacaatagaagtgaatgaagcaaactaggaagaatatagaaagaaaagggtctaagaccaaagcccaaggaatttaaatatttatagttcaggtacaggagaagctataggatcccagcaggaatctgatggcacattcaaactaagttgtttgaacagaattttataaagagactatttacaaaggtgtgggcaaggcttagggaaacagaaaaagacagtgcagttctgccagggttaacaacagttggagctttactttccccagagctgaagaagacagaggaaggagcagttccagaaccctgagaggagagctgaacatagaaggctcccagtgggagtggcagccttttgatagagggacatagtcaacccacagcaatccagctgggctaaagctgggacatacatatgacatcctcattctcctcttgccctttgatttcctgcaggagcatcccattggctgggcccaacaggaacacaaaaggcaaatgagctcacagatgcatatgggtcagccctgccagggcacagaggcacagagcagggtggagaaggccagagagtagatttgtgtacatgcacatatgcatacacacacacacacacacacacacacacgactatcaacacaggctctaagaataagactccagagagccaggggtaaaacctggagagaaagatagtgctagtgtaagtcccagagtgcaatggcccaggaaccaggagttctgatgtccaagagcaggagaagatgaatgtcccagctcaaggagagagaatttggccttcctgtgcctttttgttctgtttgggccatcaagggattgaatggtccctgaccacattagtgagggcagatcttctttactcagactactgatccaatgctattctcttccagaaacaccctcacagatatacccagaagtaatgttttaccaggtatctgggtggctcttaacccagtcaagttgatacataaaattaaccatcatagagatcaagtttactagagagttacagtagaaatcctaggcatcgtgctatatacgtttgaagtgagttatctttcatttaaagtgatggtaatttgctccattgtgtggtttttctatagccattcccagaggtactggtacagaaactgttctgtgtgtaaggtaaatgtgatgaaaggagagaaaggcaaaatagttaaaggtggtggcagggtgcagtggctcacacctgaaattccagtactttgggaggccaaggcaagcagatcacttaaggtcaggagtttgagaccagcctggccaacacggtgaaatctcgtccctactaaaaatacaaaaattagccagaggttgtggcacatgcctctagttccagctacttgggaggctgaggaaggaaaatcgcttgaacctgggaggcggaggttgcagtgagccgagatcacaccactgcactccagcctgggtgacagagcaagactccatctcaaaataaataaataaataaaaataaaggtggtggcaaagggtgatgatacagacaaatcatgacatacaagtcataaagacataagtgatgtcaagagagggcagaaggacaaaggaaaaaaataagtagattaattgattggaggcctccatgaggctgaagaagtactggcaatgtaggaaaatgtgctctaaaatatggatctgtaaaatcatgattttggaaggggtgaagatatgttgatacaacaatattcagggcggggtcatgagtttgtgggctgatgtggaattgagatggccgatgagtggatgcagaaggtttggaacaagctgcatgcctgcttgcaaaagttttgaagattaatggcatgggttgcaagagataaagaccctgaaccaggtccttaatacttcagcgaatgaggaaaagaaatcagatgaggaaggggagaggaagataaggtataacatcacgagcttcaaaggagctacgtttactgttgttgtgtgttttcgttttcgttttgctttaataagaggatggagaaataattgtctggatgtaacaatgacaaacaaggagaacccctgtcctaccatctgaccctaagctgtaggagagtaagaggatgccttagtccattcaggctgctgtaacacaacaccatgaactgagtggcttataaacagcagacatttatttctcataattctagaggctgggaaatccaagatcaagatgccaacagattcagtgtctgtagaggcccattcctcatagatggcactgtcttgctgggtcctcaggtggtagaaaggacagacaagctcctcaggcctctgttgtaagtatcctcatcccatgcatgaaggctctgctctcatgatctaatcaccttccaaaggctccagctcttaatactatctttccagccaggtgtggcggctcactcctgtaatcccaacactttgggaggcctacgagggtagatcatgaagtcaggagtttgagaccagcctggccaatatggtgaaacctggtctctactaaaaatacaaaaattggctggacacagtggtgtgcacctgtattcccacctactcgggaggctgaggcaggagaatcacttgaacctgggaaggggaggttgcagtgagcaagactgcatcagtgcactccagcctgggtgatagagcgagactacatctcaaaagaacaaaagcaaaaacaaaaacaactatctttccttgggggttaggatatcaacatatgaattcggggggaaaacaaacattcagaccataacagagggcacacaattagcttggatttcaactaaggcctggaggtataggtaatatttagagaagtgtttacagataaaggtgagtttgctgatcacttggtaggttctccgtggccgagtggtagaggttaggaaggaggtatggaacaggcttagttagataagcttttttcaaaaacagcacagcatacctggtcatttggtaaataatataacatttgttaacgagatacatttatatgtatataaaataatctccttcaactccttaataaaatagctacagagactctcatgggcctctgattttatttttggcatttttaatggtttcctttgttcttttatacgtcttgggccctcgttggtggaatttgtggcttcgattctgttcagcccaccttgaaaacaaaccattaataaatacatttgggcctccttttgtgcctcgcagaaacaaacaaacaaaatgtctatttcattagcacaccaggatctggggaagggtgaattctctggaaagaaaagtacaggaggactaggagagatgtcaggcatgtcccacaaattcaatttattcttctttccagaccacatctaaatcaaagcagctgtacttgataagcctctctggttaagatgctgaaagtgatattcagattaaaggtaatgtgaggaagactttctgtctcaggtggagaagggttttgttcgggaaaaaacagcaggcaaatcaaagaaagtactgaggctcccaaagaaaatgagaacagaagagggtgagagagaaaatggcttaaatgaacaaaagaaagattgtgcttgtctacccaggtctggctgtgctcatcaattgaatcagaactgtggctggccatctgctgctctgaatacatgacaacaagccacttgcaatgacccagcttttgactgctttagcaatggcatttcttgagatcaaagagacccagctcatcccaggaaacacttggagccattcactgtgaccttattttaaagatattatattgtaaatttaatgaaataatatatccagcctgtctagcatataggaaggctattttccttctccttccattgctacaaaaacacagtgaaacaatggacaatacacattgtcctcagtaattgggtttctccccctctgaattataaaattactattacaatagtactgaaattattattgctattttcagtgctttaaatcactcttttgcatggggtggaatttcatgtgaatggagtctttctttggcccctatcccataaggtttaattagggaagtagactcacctggaagctggtctcatagcaataatgataattacctttattgagatgctattctgggtagatcaggcaccatgctccacatacattatcaccattttccagcaagtctgtgagaaaggtatcagtgttccaattttatagatgaagaaattgaagctctggggtttctgctatttggtcaagcctattttattcataatcaaatttagaaataaaggctttgttgaacttcttctgtatcattgatgaaacagctaaccattgattcaaatcttctgaaggatcttgaagccctatgaaactgttacctaaaccttggtcactgtgatcaaacacaagaggcagatgggtaaaaacgacaagtggaaattcatgcctatcttctttttcttgaacactaatgattttgatcaaaacagagcttcactacaggaatctgtcctggggtttgtttccttctcatactgcactgattctctgggcaatctctctcatgcttagggccaactaaattctgatgactttcaaatctttaattatagtgtgatctgtttcctgagttccagatccatagatatacaattactcttgagagatcgcctcctaggagttccaaagggacctcaaactcaatatatcccaaactaaacctatcctactctttcccaaataagcttctcctctttttagtccctgtctactcagatagtcagagcaggaacctggaagtcttcatagacttctccctctcttgatatatccgatttgtcaccaagtattataaggaaaggttttcagggtgaggtatccaaactaccaccagcagcggcagtgtctggaaactagttagtaatgaaaatgtttaggaccccacccgatttctcctaaatcagactctctgggggtgaggccagggaatctgcatcttaagccctccagggaatctgatgcatgctctaattgtccttatctttctctaattatcccattcctaaagctcctgttttaaggcaggccctcattatcttatgcctaaactattacaatcatttcccaactagcgttcctttctctagccttagatcgcaccaatctatcctctttcctaccagaacgttctctctgaaatgaaaattggatcatgtctctgtcctacataaactccttcactgttctcccaaataagggagaaatataatgtggaccacatatgtaatatttaatagaaatataatgtggaccaaatatgtaatattatgtggctactagaaaacttaaaaagtaaaaagaaatgtcaaattaacattaaaatgtatattattgaacccaatgtatcaaaaatattatttcaacctgtaacgaatacaaaaatcattaatatttcatgccagatgtttgaaatctggggtatatttcttcacttacagcccacctcaattcagatgttatactttcactgaaatgatttgtctttagatttcataactgacagagttgatgtacttatccaggttgctccaaacatacttaaaagttttctggccagccacggtggcttacgcctatactcccagcattttgggaggccaaggtgggtggatcacttgagcccaggagtttgagaccagtctgggcaacatagcgggaccctatcccaagcgtggtgacacaccactgcactccagccttggtgacagagtgagaccctatctcaaaaataaaataaaacaaaaagctttccaagaactgaattgagtatcagtttttacatttaaattaattaaagttaaaaattaaattcctcactcacactaaccacatttctttctttttattatactttaagttctagggtacatgtgcacatcgtgcaggtttgttacatatgtatccatgtgccatgttggtgtgctgcacccattagctcgtcatttacattaggcatatctcctaatgctatccctcccccctcccccaaccccacggcaggccctggtgtgtgatgttccccttcctgtgttcaattgacactaaccacatttcaaatgctctaccgacccatgtggcttgtggctgctgttttggtcagcatggacttcaagagaaaattctaacccctcagcatggcttacaaggctatcaaggacctagcttctttccaagttcttcagtcttgtctctatttaattccctgctgcacataaggagtcagtttcatggaagtgcatttctcaagatatttcatgtcacttcatgcctcaggactttccccatagcatagcctgtccctcaattgcccttcccctcatctccctattcacttagcgaaaacccactcatttttatttatttatttgtatattttttagccttttgcactcctaaaaaaaaacactcatttttagtcttggctcaagaggcacctcctctatgatacctcccacctctgtcgtggtgcagatacccaggactgttcaatccctcctttgagccgccaggcatggtggcccacgcctgtaatcccagcaccttgggaggccgaggcgggcggatcacgaggtcaggatattgagaccatcctggctaacatggtgaaactccgtctctacaaaaaatacaaaaaaaatttcgccaggcgtggtggcgggcgcctgtagtcccagctactcaggaggctgagggaggagaatggtgtgaacccgggaggcggagcttgcagtgagccgagatttcaccactgcattccagcctggacgacagagccagactccatctcaaaaaaaaaaaaaaaaagaaagaaagaaagaaagaaaaaaaatccctcctttgagccaaaccaagctctgtatcaacctctaagattctcaccagatcgtatttcacttacttgttcacgtatctccacttactagagataagctgctcaaatcttgtggtactcatcctttgtacccctagcacccagaacagcacccagcactagtagacatttaattaatgtttgttgaatgaataaataatacctaaacataaaccgtttttactatgacatacacactcccctccatggacctgaagggcagcaatttaccagcgctgaagaattaatgctcttgtcttgattgtcacatcattgctatttccctgaagccctagaagtgagatgggctttctgccttgccattttcttccttctccaaaggtcatgagccacacttttgagtacacccaccacaaagaatacagaaacaggagatgttcagttctagcaactgttgtcattctctggtttgcctgggccaagtcccttaacttctctaaaccatggtctcctcatctgtgaaatgaggatcattagaactccctgcttagtaatcaaatgctgtaagggagataaagtgcttgccttatagagtcctgcttggtaaattgtgaagagttaggcaaagctaagctcctattattatttaatctcagaaggtaaccagcacagactagaagagaaggatcagctctttttgaagaatcatgcacttaactccattgcatgaatgtggtccctgatgaagacatcgactgcccctctgtcctattttccacattgcattttgttcctgaaaggaaaagatgctgtttttatgctcattggttatgatgtgtcacccaattactgcatctggctctttcatcctcttgagatctttctgcatacaggcggctcaataaaaagtctctggagtccaagatgagactaaaaagcaggaagagctttgtcaaattattgcatcttaagataaacatcctagctgaggtctaagcagtattgatttaacagaaaatttgctgagctaggctcccctccacccatgtccatctcccaagaggaagaacatgagagggttagaatgaaagcaggaaagcagatggtgaatgcacctgagaaggggccctcttccccagagtcagcttcaaagtgggccggatgatagtgtcccctgataagtgtgggtattgaagagttcgggaactgtgccctaattcttgactgggatgcaggcatcttgcaggtgttccttataaccctgtggcctaagagcagaaggcaaagactgttatgtgacaagctgacagcagaaaggatctgaagtggccaccctcactttcctgaggctccaaagcagtgtgaaagaattccaattttccctgtatctccattaaagacaaagacagccagcaggcagatattgatggcatcagcaccatggcaaaggagagagacaggtaagctgcaccccaggtaaccatacctgagcatcaggtagaggccagcacaatggtaccaggtgacacccaggtatcagatgcttccccacctctaatgcctattcagtgcatgacatttagaattcagatgcagtcctaaggaggagtgttttgggagggagaaagacctgaatcaaaggggaaggcttgactgaggcagcctggaattggcttgactaagtgattggtcaggagtggggatggagacatttatagagatttaagttatggaaaataacaaagtagacatgcatttctggtacccataagaaatatcactctctatgaacagttgtttgtgtgtctggatccctgctagattgtaaattgtgtagcttatgcatcactgctgtccacaagcccagggtttgcccatcggtatggtctgtctatgtctccacccaaatctcatcttgaattgtagttcccataatccccacgtgtcatgggaggaaccaggtggagataattgaatcatggaggcagcttccgcactcctgttctcatgatagttaataagtgtcacaagatctgatggttttataaagggcagttcttctgcacacgctctctcacttgttgccatgtaagatgtgcctttgcgcctctgatatggtttggctctgtgtctccacccaaatctcatcttgtagttcccataattcccacatgttatgggaggggcccagtgggagataattgaatcatgggggcagatctttcccatgctgttctcatgatagcgaataagtctcacgagatccaaaggttttaaaaatgagagttggccaggcgcagtggctcacgcctgtaatcccagcactttgggaggccgaggtgggcagatcacgaggtcaggagatcaagaccattctggctaacacagtgaaaccccgtctctactaaaaacacaaaaaattagccaggcgtggtggtgtgtgcctgtagtcccagctactcgggaggctgaggcaggagaatggtgtgaacctgggaggtggaacttgcagtgagccgagatcgcaccactgcactccagcctgggcgacagagcgagactccgtctcaaaaaaaaaaaaaaatgagagtttccctgcacatgctctttttgcctgctgccatctgtgtaagatgtgacttgctcctccttgccttcctccatgattgtgaggcctccccagccatgtggaactgtaagtctaataagcctctttcttttgtaaattgcccagtctcagatatgtctttatcagcagtgtgaaaacatactaatacagtaaattggtaccagtggggcgctgctgaaaagatacccaaaattgtggaagcaactttggaactgggtcacaggcagaggttggaatggtttggtgggctcataagaagagaggaaaatgtgggaaagtttggaacttcctagagacttgttgaacggctttgaccaaaatactgataatgaatatggacaatgaaatccaggctgaggtggtctcagatggagatgaggaacttgattgaaactggagcaaaggtgactcttgttaggttttagtaaagagactggcagcattttgcccctgccccagagacttgtggaactttgaacttgagaaagatgatttagggtatctggttgaagaaagtactaagtagcgaagcattcaagatgtgacttgggtgctgttaaaggcattcagttttaaaaaagaaacagagcataaaaattgggaaaattcacagcctgacaatgcagcagaaaagaaaatcccattttttgaggagaaattcaagccagctgcagaaaattggctaatgaatgagaagccaaatattagtccccaagacattggggaaaatgtctccagggcatgtcagaggtcttcacagcagcccctttcattatagatctggaggcccagggggaaacacaggtttcttgggccaggcccagggtcccagtgctgtgcgcagtctagggacttggtgccctgcatcccagctgctccagccatggctgaaaaaggccaacatagagctcaggccatggcttcagagggtgcaagcgtcaagcattggcagcttccacatggtgttgagcctgtgagtgcacagaagtcaagaattggggcttgggatcctcaacctagatttcagaggatgtatggaaatgcctggatgtccaagtagtagtttgctgcagtggcaggctgtcatggagaacctctgctaggacagtgcaaaatgaaaatgtggggtcagagcccccacacagagtacctactggggcaccccctagtggagctgtgagaagagagccatgtccttcagatcccggaatggtagatccactgacagcttacaccttgcacctggaaaagccgcagacactcaatgccagtctgtgaaagcagccaggagggaggccgtaccctgtaaagcaacaggggcggagctgcccaagactgtgggagcccacctcttgcatcagcatgacctagatctgagacatggagtcaaaggagatcatttcagagctttgagatttgactgccatgctggatttcagacttgcatgaggcctgtatccccttcgttttggccaatttctcccatttggaatggctgtatttacccaatgcctgtacccccattgtatctaggaagtaactaatttgcttttgattttacaggctcataggcagaagggacttgctttgtctcagatgggactttggactgtggacttttgagttaatgctgaaatgagttaatactttgggggactgttgggaaggcataattgattttgaaatgtgagacattagatttgggaggggccaggggtggaatgatatggtttggctgtgtccccacctaaatctcatcttgtagctcccataattcccgtgtgttgtgggagagacccagtagaagataattgaatcaagggggtggggctttcccatgctgttctcatggtagtgaataagtctcaggagatctgatggttttaaaaatgagagtttccctgcacaagctcttttggcctgctgtcatctatgtaagaagtgatttgctcctccttgccttctgccatgatcgtgaagcctccccagccacgtggaactgtaagtccattaaacctctctcttataaattgcctagtctcaggtatgtctttatcagcagtgtgaaaacgaactaatacattctccttcgccttgcaccatgattgtgaggcctccacagacatgtggaatcgtgactccattaaacctctttttctgtataaatgacccagtctcaggcatttctttatagcagtatgaaaatggactaatacagctgggtgcggtggctcacacctgtaatcccagcactttgggaggctgaggtgggtggataacgaggtcaggagttcaagaccagcctggccaagatggtgaaacccccatctctacttaaaatacaaaaaaattagccaggcagcgagcgcctgtaatcccagttacttgggaggctggggtggagaattgcttgaacttgggagacagaggttgcagtgagcagagattgcaccactgcaccccagcctgggagacagagtgagactctgtctcaaaaaaacaaaaaaaaaaagaaagaaaagaaaagaaaatggactaacacacccatcctaggcctacctgcaaagtttgcaaaatcactctgaaatgagctgagttcgagccagtatgctccagcatacctggcctgtggcctttcttcccccttgcttatctgttgttgcagctcagaagcctgtatgcattttcgctcattcacttattcatttactcagaaaatatgaaaatatttattgtgtgcttgaattgtgaagctctatagatgcaagtgagaaaaagaagtggagattttaagtgaggctttgggttggcatgttttttggtttttgtttttaattttccagagtcctgtcctacttgtcatctcactatagtttcacagccacagcagaggcaaagggaagcagatggtgttaagttcactgtacaggtgaagaaaaggaaagacaagttgagcttttaccaaagtgacacaaaaatttgtggtagagatggcgtgacaaacaactcgcagttttcctgactctagttcatgcagttaggtaaaaagacatcagaacatttgtttgggttaaaagtgcaatcagccaatggaaagagcttctcatggccaaagttagagcaatttgagcaacataaataaagtagtattggattataccccgaagtataaaatacatatccaagagtctatgctgatacaaataaatgacaaaataaataagtaatgggggagaatagccaaatatccctgcagcagaattccatataatttatgtagacattccatgctccaggaggtagagcataattccccactactcaagtgcaggccgcacatagtgatttccttcctaagagtccagtggggagagagggagaaaaaggtacatttatagtggagcaacctgacaaacaccacctcagccagctgatcaaggtcaacatcaaccgtgataagtcatgtcccttagtaacatgtgatgagaataacattgcgtctttgtggtctcgctctcaaaaactcatgctaccagtctaatcatataaaaaaaaaatcaggtgaatcccaattaagggactgaattagtccattttcacgctgctgataaaaacatatctgagattgggtaatttataaagaaaaagaggtttaatggactcacagttccacgtggctgggaggcctcacaattatggcggaaggcaaaagccatgtcttacatggcgacaggcaagagaggacatgagagccatgtgaaaggggtttccccttataaaagcatcagatctcatgagacttattcactaccatgagaacagtatgggggaaaccacccccatgattcaattatctcccactaggtccctcccacaacacgtgggaattatgggagctaccgttcaagatgaaatttgggtgggaacacagccaaaccatatcagggacattctacaaaatacgtaaccagtactcctggaaactgtcaaggtcattagaaaaaacaaggagagtctgagaaactatcctagccaagaggagcctaaggagacaggatggctaaatacaatgtggtctcctggatgagatcttgaaacaaagaacattaggtaaaaaacaaagaaatctgaacaaagtatgaactttagtgcataataattgattgattttgtttcactcattgtgactcatataccatcctaatgtaagatgttaataacaggagaaactgggcatgagggtatatgggaaactctgcactaatgtcataactttgctgtaaagtaaaaataaaaatagtttatgaaaggctgggtacagtggctcacacctgtaatctcagcactcaggaggctgaggcaggaggatgacttgagccctggagtttgagaccagtctggacaacatagggagaccctatctctacaaaatttttaaaattagccgagtggtggtatgcacctgtggtcccagctattcagggcactgaggtgggaggatcacttgagctgggagttcaaggctgcagtgagctgtgatcatgccactgcaccccagcctgggtgacagagtaagaccctgtttggaaaaataaataaataaataaaaagagccaggcatggtagtgtgcacttgtagccccaactacttgagaggctgaggcaggaggatcacgtgggtccaggagtttgaggctgcagtgtgttatgattgcctctgtaaatagccactgcactccagcctgggcaacatagtaagaccccatccctaaaaaaaataagaataataaaataaaatttaaaaagatgaattgtgcaatggaaaatgtacaaccaatgtattgccggtgtaataaagtggcgggagggttggtgggaggaaagtgctatacaagcctttattctgctttctcttcattctttgggattgacagtcagctttggttgcagcagcacaggaaaaggactcctgtgttcctgacacaaatcttcagcccttccagtgactggctgatcctggataaacgttttccctgctgtcatctctaaaagctttgttctcctgaatcaataagcctatgcacatcactgtggtcattcttctggcttacctggaatttggatcatctactgcatcatcgggtttattttcagagcccagacaagagtgggaaatgagtgggaaattgggagtcggaaaacctgtgagcatcacctaattgtgatgcccctgacttaacctttctcattctctatttcttcaaccataaagtaaagataatgatggtccctggggtagcaaaagattaaatggtgtaacgtatgtgaaagctttctgtgacctagaaagggctgcaaaattttattttggaatgtccttgtctttggggaggctaggacttcgtgcatcttttctccttaagcagttctctggattattctctcaatccagttcaacagatatttgtcaagtatcattaacatgtcaggtacattaagaagtgcctcagcatggaaacgttggaagatggagaaacacgggcttctcagaattcgcatgagaagagctgtgtgtggctagatggataagctgcctgggcggggaatgatagcccactagaagcatgcatcaattatgatgtatttggttattagaattgaaaacccaaatcaaaatggcctgaaaaagtcactggctcacctaactgaaaggcccagacctgcgtgggcttcaggaatcaatgacatatggtggcttaaccacagcatcaaagactcagttttatctttttctgttctgttatctacagcaatggcttcatcctaaaatggcctcccccatggttattaggatggctgccagcagcatgtagggctcttagcttccttattcacaatgggatgtggtggggggtagcacttataaaataaagccacagtccatgaacttaaccacactatctgaattagccaccccacctccagtctcttgctagtccctaactctgtatcatttctttacacaatttgaaatattatgttttttaaatattacttattatttatttgcatatctactcatttatactcaactctccctctgaaatataagttccatgagggcgtggatttcattttgttcaccactgttcctgaaaccaccttctaaggagagtggttccctctttagtccatgagatagaggctgagcctgctacgaggagtcttccctctctgccctccttcctatgcccatggtgcttcctgcctgggtcctgacactgattagggtgctaccaatcaggattttgctggaatgaaagatcacaggtggctcatgtctgtaatcccagcactttgggaggctgagatgggaggatcgcttgagcccaggagtttcaaaccagcctgggcaacatagtgagactctgtctctaaaaaaaaaaaaaatagaaaaaaaatgagccaggtgtggtggtgaatgcctgtagtctcagctactcgggaggctaaggcaggaggatttcttgagccctggaagtcatggctgcagtgagctgtgatcactgcactgccctccggcctgggcaacagagtgagaccctgcctaaaaaaaagaagaagatcacaggtgcccctggaaggggatctttctaaatgaagacagcctaagttggcatagcctgggtggaaaaacaggacaggtgatcagaggagctggagtaaatttggggagaaagaattgataaaaagtatcacccttgaaggaaggaggaaagggggtagtgacagcgaggtcagtagtcaagcgggtgaaaaatacgatggcgtgaggtgaagggcccaggacggagtctcagcagggtgggcacatgggctcctggcacacacaccttctgcccacattcctgagcacgttacccacactttttcatggcaatgctccaagggccctgtggaatatgaataatagttcttcacattttaagagcattttataacttacaggacatgttcccagacattatgtcatttcatcgtcacagccattctgtggggctagtttgattattctgattctgaaagtgaaaaaaacaagcctcagagcaattttccaaacaccacacagttaagacaaaggaaagctggatccagatattcattctccttcgagtcctgagttcatcttacaccattggaaaacagggtaatgatgtcctgagatgaaaatacattgaaaactgcttagggctaggttttttgttttgtatttattttttctgtttagggttgagttgctttgtactttcgtacacatataaaattttccataataaaacttttaagaaattttaaagaatagagttgagttgctcggtcagcccctggaagagtaaatccaggggaggtcaggccccaaggaagtcaggtgctgaagggtttaggcttcagcctttaagatttaactttaaaaaagaaggaggaacatttgggaataaggaacaaggaaaatcatatgcgtgctcaagcagctaaaaaaaaaaaaaaaaaagacacaaaggaatgatttgttccctccgggttttatattctcttgccagatcctttaattatgcttctattcttttttctcaaatttaattttcccccagacttaaataaagaacagatgatgcttcatagaagacttggtaaaatagcctttcataagttatttctgcttgggtgcaggtcctggcttgatctccaattcgctgtgtgatcctgggttgttatttacctcctggaaggttcagtctctccaactgtaacatcggattgagaatatgtgccactaaatggcctcaagaaaaaggaaaagaaggtaggtgatagccacaaaggcacttggacgttttccatagagagatgtcttaggtttggagacattaccattagagcatttctcagaaccacctagtctgtgagttactacagacagggccctctgctgccctggcattaaagttgacagggccttcataatctatgtgggctgggaagggacctcaggtctgaatcctttgctctttctggtcctccaggttgtctcctggttgatttggttggtttgacagttttcatctcatgaagtgttaacaagttgctctggtgcatcaggaaagagaatctgagaaagagaaatagtccttgattatccttgctaaaggcagagcataagctcaaagagcagataatctcaaagagcatggtcatttaaattcagcattgcagtaataattttaaaagttttatcttcataattttattttgttttgttcaggctgagctttgcaagaggcaagggagcggcagcccagatagatgttgggtgctgggaggaagattggggttaatcctggctcaaggttttcttctctttgccatcacttttgaagacttcagtacacatgccggcagtgcatctgacagcttggtctcccaggtcttcttgtcttaacaccactgatattctctcaacaaatgatccttttgatgacactgactatcaagtcttcattcaaaatcattcattcattcattcaataggcaagttccaagtgactcctacatgtcaagaacttcttaaggattcggagtataaaaattagaaaatttcctcgaccttgagctccattgtgagaaacagatgaagaaactacagtgtcattaatgactatcataatggaatgccctaggggaatgtgaagaaggagacctctctaagcccaggtgagtcagaaaagacttttaggagaaggtgacacttggactggaaggatagggaaaatttttctttgcttttcttgcttttctttctttctctttctttctttctttctttctctttctttctttccttctttctttctttctctctctctttctttcctttcttccttccttccttccttcctttctttctttctttctttctttttctctctctctctctctctttctttctttctttcttcctttctttccttcttttttttttgtgacagagtctcgctctgtccccaaggctggagtgcagtggtgcaatctcggatcactgcaacttctgcctcccggaagttcaaccgattgtcacctcagtctcccgagtagctgggattacaggtgtgcaccaccatgtccagctaatagggagaaattttcaatgtggatagattaagggaaggtgttctaggaagagggtgcggcacatgcgcaggtgtggaggcgtgataaagcagtggcatattcaaggagttgagcaagcagtttgatcagctgtggaggagcaagagatgaggctagacaggtaaattggtgccagatccagtgctgggtctattgtgaaggagaaggggaactagttcagagattttccccagacttaattgaatcagattctcattttaaaaagtgcactggtagaaatgtgaatagattagaggcatgtgagattgaaggtgcagggtgggtggcagagggacctgctgggagccatcacagtaaagcacctgagaatggataaggacctttactaaggcagtgcctgtggagaaggtgagagggctagagagatctgagcagaagtgtaaaggacttggcgaccatggagtgtggaggatagatatgaaaaagggagtctagaattactcccaggtttggggcttagctgattgtggagatagttatactgttggcttatatagaaaatataagaggagattcaggattgggagaaaagatgatttgtttagctctgaaactactgactttaaggtgggtatggttgggcatctatggggagattgccagtggacaaatgggtttcaggctttacaagtcatagctgggtgcagtggttcaaccctgtaatcccagctacttgggagactgagatgggagcatcacttgagcccaggaatttgaggctgcagtgagttatgatcatgccactacactccagcctgggcagtagagtgagaccccatctctgaaaaataaatacataaatatttaaaaaacgatttggaaatcgggagagagtttagtgctagagactcttaccatagatgcaagtgagatcgccatgggaaagtgggtggagagccaagggaccatggatacaccaaggtttaaaggtaaacagagcaggaggaacaaggtaagaagactaagagaaaggccagaaatgcatgggagaaaccaggcagtaatgtgaaggaagccaggcctgggggagatttaagaagggaaagtgcacaattctatcaagttccttagggacgataagtatgatgaaggccagaaatagggaaaggaagagaggattggtagaataaggtccaaatagctgatgggcttgaagaagagcctttgatagaaggagggccatttttccctaatatgaaatgaaaggagataaatatgagagcaatctacctgtacctctttcccttcataaccaagggctattcaacattcatcagagcacctctgatgaaggtgcatagctgggaatggaattcagcacatattgatggtcaggtcctgtgctagatactttatgtaaatcatctcactgcagccctttgaggctgacagcataatcctccctttcaagatgaggaaatcaaggctcagcatggccaagtcaactgcttgtctctttcctctccactgattgccaggtcacattccccaaaacggatctgtgaagagccttttatttctcactggctcgagctcctaatgccgataagtgaaaataaagatagacttgggccagatgtaggctgctatttctaccacgaacacattcacaggaacatacttaaatcaatgggtagaagagagataagacactgcacaaagatgctttctttctttttcttttttttttttttttgagactgagtctcgctctgtcgcccaggctggagtgcagtggcgcgatctcggctcactgcaagctccacctcccaggttcacaccattctcctgcctcagcctcccgggtagctgggactacaggcacctaccaccacgcctggctaatttttgtgtatttttagtagagatggggtttcatcgtgttagccaggatggtctcgatctcctgacctcgtgatccgccctcctcggcctcccaaagtgctaggattacaggcgtgagccaccgtgctcggccacaaaaatgctttctttcaaaggggcagaggacagctggggggaggggggcacgaggggagtgggtgatgttggggagggaggtcagccaggatgacttcagggctgcttgggaatacctggttcattttatcttgaaagttggtgatgtaaagcaaaataaaagtctcaggattcccaaactcattatgccaaaggaagagttaagcctgagtcaggtaacgttaccatccttttcccaaacagacagcgattacttcccaaccttgtgtcaaagcattatacattaaccagacccccacaaaggcaaaaggcctcctgcacccctctggatgactgccctcacaagggatgaccccttaacctttcaagatgtatatcctcctataaaacaagtacatgtcagttgtaactttaggtctgtaagctgaatttagctcctaaaactaaggtctgttaagtctcacatggacaaatatcgagcttatctccccaggtacagaacaaggactagacgagatcaatcattccttcctccaccctgccatgtctacataattgactcttcgtttttactccctcttctttaaatgttcactgaatcttgtgtaaaatgtagatttactgggcactaagtagagcctcacaagaatgtaatcgtttgcctcaccgcctagtccccacttcctgcatgcttttcacctttaaagaaacatataaatgctgagcctcctgaaaacctctttggacagcacaggccacaggggcttctgtgacttgtatttttcccgggtgttccctcaggctctggctcaataaaccttgggtgattgagactcctgcctcattctctcatttgggttgacagtgtcatgtttaaactcaaatgttcacagtgtttttctaccctgtgaggctgatggtcttattagtataatctgtatttgaaagataagcagaggcttgggtgcttgcccatgttcctttggctttaggagctaggacttaactcagtgctatgaatccagaggctgggatgttctaatacccaagcatgaatgattcttccactaataatcaccttgcacttgtgcctgtgggccttaccatggcttacaggacgctgtgtaccccggcattcagtacccctcctaaagaaaaaaataattcatgacacttgttcaagatgctaaggcagattttattcagcgggactactagaatgggattttgtagtaggagagagagatcaggatcaattccaaaaacaacaaggacaagtggagatgtatagacaaggagcagggtaggggtcagtggatggaaaattactaagaagaaatgtcacaacttgaaggattcttgctgaaggaagtccagcggaataataaggaggttgatcagatatcaagagtggagaattttcgctgaaatgacccagtaggattcttgctaaaactggaccaaataggatgacaacgcccaaggtcaggtattagtcagaaagaggactcagagaagcctgagtcaagtctggtcaaaaaagacagtctttgtcacaaccctgacctcattgccgatcctgctctcccctcgctcaaaaccctacatcacgggcctttttctgcaccaggctatgcccacctcaggcctttgcacctgctaggcctggatgcctttcttagcgggtgtctggcggccagggcccttggcctttcaggtcttacccaaatatccccttctcaatgagactgtccctagcttccatgtttatgagcacacgtccgcacaccctcagcattttccacacctcttccctgattgatttttcaccctagcacatatcaccatctcatacactacatattttctttatatatttgtttattggctattttccccacaactagaatgtctgttctatgaaggaggaacttgtgtctgttctgttcacagctttatcctcaacaccaggagcagcatctggcacctacaaggggctcactctttaaatgaattggacacctggatgagggtctctataaataccctcggatccagatgatctatgtcagtaccaaaggataagaatccccaatagtaggccgagcgcagtggctcacgcctctaatcccagcactctaggaggccgaggtgggtggatcacgaggtcaggagtttgagactagcctggccaagatggtgaaaccccgtctctactaaaaatacaaaaattagctgggcacagtggcaggcacctgtattcccagttactcaggaggctgaggcgggagaatcacttgaaccccggaggcagaggttgcagtgagctgagattgtgccactgtactctagcctgggtgacagagcaagactccgtctcaaaaaaaaaaacaagcaaagaaatcccctgtagtaaagaaatccccagtagtccaaccaattcataatatacttcgtcatgctttctttccatttaatacagtatcacagaaattagctcaggtgaatgacaaaatattcgccttccgtaagaagtctatgttggtacatgtttgcaagggggcaaaaaaggaaaagaagttccaaatattaagacaaagaaatccatctgatatggtttggatctgtgtgcccaccaaatctcatgtggaattgtagtcctcagtgttggaggtggggcctggtggaaggtgattggatcatggggacagatttctcatgaatgggttagcaccatcccctcagtgctgttcttgtgatagtgagtgagttattgtgagacctggttgtttaaaagtgtgtagtaccttcccccgcctcttcctccctctccagccatgtgaagtgctggctcacccttcaccttcccccatgattgtaagtttcctgagggctccccagaagcagaagctcttaggcttcctgtacagcctgcagaatggtgagccaattaaacctcttttccttataaattacccagtctcaggtatttctttatagcagtgcaagaactgaacaatacgccatctaagatttagtctgctgcagaagaattcatatgtatacaagattgtctttctcactcctcaaaataatagatgagtcaataggtatgtaaaacataaagaatgaactgggcccttagtagggaatcagtcaatattagctattattattatgtccccttccacacacctcaccctttcctgaagcctgctctttcctctccctggaatatgtctttctttgaccctgtctctacccactgccccctcacttgactccctggcaattcctcattcaccctttgagtgtcagccatactactgcttctgtacagagggtttctgactgccctggacagggctaatcactccctcctccaataatagcatccaatacacaggtggagattatgttgtgttataattgttcatttgtctccacatccttctcccctgagggcagagacttaccttattggacactgtgtccccagcctctaatacaagtatgacacatggcaggactgggggaatgatggatggacctcaggcatcccaaacacagtaaacaaggaaggaaaaaaatatctcagcccacacaggtgttgcccattcatcatcctttgcctgggaggataggtaagccctgcttcgaatgaacccggcatgcttaaatgttcagctaaagcaaagggtgattcattcacacatgagggttattcatttgagggcagagttcacaagtttctttaaataatgagctgctttggtgctctcataagtaagagccatctttcaaacaggcaattcgacctcaccctagcagatgcacaaatgaataacacaaagtacgggacccttgttgaaaagacaggtaaatcagcatcactttctacttggtcatgcacactgtcacattcactggccacagtcatctatctgtgtgatgccaacaaacagattgacaaaagctccccaaaacgtcaaatccagattaaggaagttggggggcagagaatcatctagactgagcaacaagcaggaatttggcctttttgttcctattttttttttctgttataacatcctcagtccctagactggtccctggcacataggcaacacccaataaacatctgttgaatgaatgtgtgaataaaggaccctacaacatcactgggaaagaaacaaggtggagaaggcattaaacgactgtagttggaaggaattctttaataagccactaggagcccgttggtgtgagtcccccaggaggcatgctcaggttggcgagagtgcacagatggtgaccaaattgctgtccaaattgacagagtgtgggctcaatgtattgaaggccttttgttttgctaagcaaagcatgcagctcctatctggacataaagaactgccccagcctcctccttttctaccctttctctatgaatactcatgttcttgtctaaagaaatgttgaatatttggccaggcatggtggctcacgcctgtaatctcagcactttgggagccagagactggcagatcacctgaggtcaggagctcaagaccagcctggacaacatagtgaaacccagtttctactaaaaatacaaaaattagccaggcatggtagcacacacctgtagtcccagctactcaggagactgaggcaagagaatcgcttgaacctgggaggcagaggtggcagtgagccgagattgcaccactgcactccagcctgggtgacagggcaagactccgcaaaacaaaaacaaaaacaaaaacaaaacacaaacaaacaaaaaaaacttgaatgtttaaagaacattgtttaaaatgacacaaaattattagaaaggctggggtaaccacatgcctcagtttagcctcggccatcatttgatccagaaccatttataagagctagaaaatgcacagaacaattttaagagtggtactgaactgttcttcaggttgtttgtgcatgaaaaatatccccaggtgggctgtaatcataattttaaaagctcagccatatgggaaagaagcactaggattatttacccagtgtcaatcatatgtcagactgtataaacttgacactttcaacatattatttaatccttatgaccgcactgcaagagaagtgatataccccttttgcagacaggaactgaagctcaaaaagtaataccaaacttaccgaagctcacccagccaatttgtcacaggctgtctgcttccaccctgactcaacacgcagctcatagatgggattcaaaaaacactttaagagacttcaagagaaccaaatcctaatgatcaaaaagttttcctgaccttttcagtgactgacacagtagatcgggtgtgttaagtgtggcctggcacagaacagcaaaggacctgtgacctctcccaggagatagggcaagcctccaaagcctactttcccaagccccccttaagccttgctagtctattttgacttcacaagtctgactgcagtgaaagtctgagtgataatgagctgtgtggcagaatgagaaagcgttctgttgtgttgaacaggcccctgatgagaatagcttaactccccttgcagagtggcgagagtgcacagtggcactgtttcttggaaaaataacaccaccaatccattgcagggatgtaggtgggaatggcacagaatgtaagaacatattggcactgtctatttaaaatagcaaaagcagtagaaagacataaatgcagtaattctaaccttgttaaactaaaaacattcctcggggccccttgagaaacttttattttgctgcacaaggagggaggtgaaccagcttcttcgaggtcagtttcctttggagattttcctattccactctccatctcactggcacgtgagaagagtagacataaactgaagacaccaagtataaatgtagagatttggaaatgagctctatttttaaaaggtcttcctttgggtaaacccatcaataaacctttgccccaggaatggctctcttgaaaatgaaaaaagcctctagggttcctgggttcactcgggttctgccacttaccttgggcaaggaaacttattcatctgtatttgtttcctcatctgtaaaatgggaataagaaaatgatttatctataagttttttgtaaacataaaatgagataatccatgtaaactagcagagtacctgatacataagaagcagtcagttgtttattattattacctttaaaacccagtcataaatatggacgaagctgtatgttcactgcagcattgtttatattaaaaaatctaaagcaatctaaatatccaaaattaggcaaatgattaagcaaaataggctgcatatccagttctgaaagatgatgaaatcattgaaaattcttgctatgaaatgatataatagtaataatagttttttgttttttttttttttgagatggagtcttgctccattgcccaggctggagtgcagtggtgtgatcttggctcacagcaacctccacctcccaggttcaagcaattctcctgcttcagcctcctgagtagctgggattacaggcatgcaccgccaagtccagctaatttttttttgtatttttagtagagacggggtttcaccatgttggtcaggcttgtcttgaactcctgacctcgtgatccgcccgccttggcctcccaaagtgttgggattacaggcgtgagccactgcgcccggccaatataatagtatttttaaatgcttataataagtaggaaaaagtatataaaattacatatgtggcatatttacagctgtataataaaaatagggaaataaaaaattgcaagtatattaaaatatattatgataaatgaatgctggataatttttagctttctctattttccaaaggattttatatagctgtatgatttttaaagtaaaaatattcaaaatatttttaaaaatttaagttgttgcttctggagtataatctgcactaagacccaatgattgcacaattgttttattttattactatattcagaaaagaggaccagagggaaatacgttaggccaaatacttttttctctcaaaataattttgtaaattgttatttctaggaaagcaccaataaaaatgctggacattttcttctttaggacatattttctaatatttacactctattttctcatcaactttcctgtggttgccacgaatgttctagctgacccttgtggtcaaaaaagcctctaaggcctaagaagctaaaagtcagtttccagctagtaagagtgcttgtgatggacaggataaacctgctaaaaccaaagtctgtcctaaaaaatgctttattctcagtctttcccttccacagcaacattctccaaccttcccccgaccctgcccctttcattcaacaaaacttcttcactcttgtcataagccagtgctatgctagaagctaggaacagaagtggatgagactctgtccctgcctgaaggaggtcagtcccaagaccagaggtaaagacagtaaacacaatcacaatgcaccatgacaggggccatgaaggaatatctgtgccatggggtcaaaggagggcactactactcatgccagggggaacttggtcaatggcacaagggagatgggtggcacctgatgaaggcttggaataagcaactatttgccaggtaggaaaggggctggagtaagggcattccaggccaaggaacagcaggtacaaaaacacagctgcaaaagcaccatgagggcatgtgtgttgtgggggaggctgtgaaaatcactagcagggctgatgtcaagtggggttcagctggggagagggccgatcaggcggagtcagcatgtgaagagtccatgctaaagcatctggcgtgaatcttataggataatagtcagtggaagttttggagcatcgagacacatgctcagattttattttgggaagataatgctggtacagtgtggaggatgagctcatttgaggggtgtaagcagtggcagggatacaaatgaggaggtggctgctgtagtctgatgagtgctaagtaggtctttttaggaccctgcagtgtgaagagaggtgaggaaccagaccagggagttgtgagaaaggcaggggtgacagttctggctgacctgttgcatctggggggtgcaagaaatcaaggatgcatgaatgaacagatggctgtggccatgccattaactaagttaggaaatttcagaaaataggtttggtggtaggatgaggaaagataatgaaatcagtttgggacggtttgagtcaatatgtctgggagcatttaggcagttgactagagagaggtctagtccttagaaaatagtttaaggctgaagatactgaccaagaagctgacagcacaatagtggggacactctagaaatggatgaggtcacactggtgacctaaaggacagaactcttgggaatcataacgcttcaagacactcaatcttcaaaattagatttgacagagagttatctgagggattattgaggttctaaaccatgtgaatagtgttttcttttctgtgtccatgcctgatgaatttttagttcaagtttttttatttgtttctgctgactctagaaatgcagtggtatagtcaatgggaggcttcggaatcagatagagctggttgctgttccagctccctgatttaggatgaagcagttgaacttctctggccctggtttcccacactacagaagaggtagaatggcatctaacactaggagagttgttaagatttataatctgctacttgtctggttggtaacataaaagactgtcacctcagtcctatagaatattaaatatgctaaaccaaaaggcttaccttggtaaggatgcatcatctaaaaaacttgaaatcattaggtcctgactagtgtattttaaactgaaaatgtctgttgattaatgtttgagctgactctggcatttcaattattaaaaagtagactagaaagttctaagtgacagggtgtattcatttttcttcacagtcatctaatttagagacagtggaacaaatccaagtaacaactttattgtagtatacagcacaatttttacatacatattagtggttttgacagtgttacttttgagtagaccttaaatgaatccacaaagttaatatattaaaaataaaatatacacagtaaaacaacaggcatccagatgttcagaatcatgcagataggagtggtttggttggtgttatcactgggtaccttgcctatttaactcgccagcaaataccacttcttctgtttctcattcccatataattcatcaaaatcagagagttctaaacatatacaaaataaacctcttttaaagccacatcagtaaaaaatttcaattaataaggttatcatcaaaccaagaattccactgatcatttgatcagcccattactaggaaacaggcaatatcagcacccgatctaaaggcaagcctatttcatttattaaaacaccaacaagagagattaatcaacaaagcaactattaacaacatgttaatcttaatataagacactgagagaaaagtaaaaataatacataaatatcactccactgagccaggatataactcatggactacagatacatgagtttctacctgtcaaacaatgctttaaatattttttctaggaaaaaaaaaaaaaaacacaatatatgagaagatgcaaaggaaaggcagaaatgtgaatttatgcatctagttccacaatttaaaataaatatcaaactgacaatataaagctaagtgacaatgacttaaccattgggcaccaaacaggcaatacaactgctcactgtaatacataatgctcttcaggagtttccagcagatggccatcacaacaatactgtcataatacagaaaaaacatttatccactgtggaaagagaccctgaagagaatgtggcaaaggcatagagaaaaagttggatcttttgaaaaagttaatgatatcaaaatacttttccatcactggtaaaccaagctaggtcaagtatatgtcccaaagcagcactgaattcagagtaagaggttggcagaaaagtttggaaaactgcagtttttaaaaattggcaatttctccatgcttaataaaactatcagaagaggtataatgtttgttcgtttgtggaatgttgactgcttgctgcaaaaatttacaacatgaatgaggacctgcagagatgcatatcaatgaaatatttttttaaaaatttacaaaaaactaaagtttctatttaaaaaagaaccatgttatgccaagatgaaacatggtaaaaagtagtgtaagttctgtccatgattctttacctagtgaatgggaaagtaatagaaacaattttcttcttaaaaaggaaggtttgttattgcactgacttttacaacctgacatagtaatttagaaaaatcatgtagtaaaatctgtaaaattaaaatataaaagtctggtttgtaaacatcagttggccaagtctattcagagtccttcatgatagtggaatggaatgaataattaattcactaccttatttatttgctgtgaggcagaaaattccagaacacagcctttatactttcacagtaattatattcaaaagatataaagtcagtgcagttattttttttctttccctgtgcaatgtttagctctcaccccactcccaagtgccataattgaaataatactggtttggagaattagtacagattggtcataaatgccgcataaagtccgtaggacttcggtaaaggtatttccaaatggcgtagtaatgcactgcagctgccgtggccacaaacaggtgccagatggcgtgggcaaatggaatgatgccatcactcttgaagaacacaactcccaagcaataaattaagcccccacaggcaagttcctgaagtccatcggtgttgttctgtcaacagagaaaaaaaaataaaaagggtttgatgttactctgcatggcaagctacagataactgtaattctctctaaggctcttgattttctagacaatgaagaagctgtgtgaacacaatcctgatctgtaaacatgaaccaaacataaaaaaagtctcttatacatcgacctggattgccctttggactgacactcttgagttgagcaagcaatcacattacaggtcccaaatgaaaaagcagaacattctgctcatttacagcatatttaagcaaactgcaatcatagccagacatgggagttcattttaataaagtgcaatcctctgttctcatcttcccctttaaatgcttccttccctactaaggcaggcccaagccactctatttataatttacatctcaggcagggtatttacttccctttgtccttctcaaacactgttctacactgattgctgctttgagacttcccctgcttatgtgagcttatagattccttaaggctgacacaggaaaaccgtaactagaagtgacctctgaaatcacagatcacatagtacaagatatttcctagccttctagatgtctccaggcctttttgtattcgagcctggccattgcttagcttagcaataagttaatattcttgtgtgtcttagggcagaagggagaattttttaggctgttcttggttttcaaagaccaaggcccatctacaagattaaaatggcttgtatgaatgaggagagagaatagaggcaatgcttagaagctgatgaagaaacaagttagtcccctggatttctgaggactaggaatagaaaggagacaggttctgcagagtgaatggaaacctaaggcagatcacggcagggccttggaaggggataggtgtgtgggtgtcctagaggcctgggcactgggcagcagccttgtgtgccccgcaagagtaaagggaagctctaactcaggcacctgattagaatgggccccaaggccctcggctaaaagcaaggcaacaatagaccatcatgagctaaggaccaggtgtgaggatctagggccagctgtgagcttcagtcctttttcaaagttcacagaagcccccatgttttgtgtgggatcaaaagatggggaaggagccaatccaaatggactgacattggatttcttcctaaccttggtaagaaaggacttcagctagatttatttttatttaaaaagtaaaaacaaagacaaaataccacacgttattaattcctcaaggttatacagcaatgaatacacattatacaaaagtatttgtgtgtgtattaggagccctcttctaggataggggtaaggctctcatcagattcgcaaaggggcacagggactcccaaatagtaagagtcactcatctaacacaacccccttattgcagaggtgaggagactaaggccagagcagtgaagtggcctgaacaaaatcacatggccagtcactgttacaaaatatccttttttttcctttctgccaaaacaagcaagacaccaaaccaagtacgcaggttagttttgacatgcattctgttaactagtatcctcaagataccacatttacctcaactttcaaagacctagaacatagttaattctgtatcaaaacagaatttttttttcattatcattatcattattgtaactatgtgccaggcactgtttgaagcacttcatatatttattcatttaatcttcacaacgaccctaaattaggtactattatctccattatacagatgagaaaacttttttatccagtctgacaatctctgccttttagttggagtgttcagtccattgtgatgtaattgttattatatatgaggtacctaattactgatatggttgtattgaagcctcccgtcttgctctctgttttctatttggtttcatccatcctttgtttccgttttccaattttcccacctgctttagactaaattgaataactttgggattccattttatcttttctcttgactacttaactataacatttattttgcttttgttgttgttggtggtggtggtggttattcttttttttttctgagatggagtcttgttctgttgcccaggctggagtgcagtgcatgatctcagctcactgcaaactccgcctcccaggttcaagtggattctcctgcctcagcctcccaagtagatgggattacaggcgtgtgccaccacacctggctaatttttgtatttttagtagagatggggtttcatcatgtcggtcaggctggtctcgaactcctgacctcgtgatccacccacctcggcctcccaaagtgctgggattacaggcgtgagccaccgcgcctggccagtggtggttattctacggattacagtgtgcatccttagctcatcacaatgtacctttattattataccccctatacaaggttaagacccttaaaacaatgtgcttctatttctccaccccatccattgttaccatgtactttacttctacatgttagaaacccccatgttatcttgtgaagaaattaagaaatgaaaaacagccatgtatttacatacaaattcatcatttctagcaatcctggtttatttatttatttatttagagacagcatcttgctccgttgcccaggctggagtgcagtggcacgatcttggctcactgtaacctctgcctcccgtgttccagtgattctcctgcctcagcctcccaagtagctgggactacaggtgcccaccaccacgcccagctaatttttgtatttttagtagagacgggttttgccatgtcggctaggctggtctcgaactcctgacctcaagtgatctgcctgccttggcctccctggttaaatttttgacattaatattactaaactgtgctaacttcaacttgaagttgacagggtttttttgttttttcctttccgcattttatttatttatttattttattttatttatttttgagatggagtctcatgttgttgcctaggctggagtgcagtggcccgacctcagctcactacaacctcctacaacctccacctcttgggttcaggcgattttcctgcctcagcctcagcctctcgagtagctgggattacaggagttctgccatcacattcagctaatttttgtatttttagtagagacagggtttcaccatgttggccaggctggtcttgaactcctgacttcacatgatccacccgcctcagcctccaacgtgctgggattacatgcgtgagccacagcacccggaccctttcagcattttaaatgtgccattacattgtattcctgctcccatgaattctgataaaatgtcagtggtcatcttctctccttgctcttttttctctctctggctgattttaaggtcttgtctttgcctttgttttttagtaatttgactttaatgtgtcttagtgtagttttctttgtgtttatactgctcaggcctcctcgtgctttgtggatctctaggttgatatttttcatcaaatttggaaaagttgtaactattatttcttcaaaaaaaaaaaaaaaaaagaaaagaaaaactgtaaaacagaaaacccaaaacaaaaaactgccccaatttctttcttcttttgttcatttttaaatcactcttttctctcatgcttcagtttgtatagtttctacagacctggcttcaagttcactgaactttgcttctgcaatatccaatctgttattaaatccctccaataatttttttttcttaagacatcacagttttcggatctagaatctccatgtggattcttcttcatagtctccaggtattttctgagattcctcatctgttttaaactccctgtgtgtgaatctcagtatctctcccgtcttttgatctgtgtctattgatctgttttcccttaggtatgtgtcactttccagtttcttgcccatctggtaatatttattatatatttattatttattttattacattattattgatttatttctgataatatttacttatggtacatgctaagttgttacagtaaagattctgttgtattcctttaaaaattgttgagttttgttctgttaggcggtttatttactggaggatcaattttatcctttcaaggtttgtctgggccttgttatggcagttctagagtagccctccctctagggatagagtagctctactcctaagctgtggccttggcagggtcagctgagtgcctgggatgtccagcaccatctctgaactctgcttggttggaacttcaatgtctttcagcactgggaactgtccggaatttccatttatcttccagccttctaagagttatttgcaactggagcttgcagagttttggcccgtacaacattcagcttgatatctggacaacgactcacggaaactgcttcatggatttctgaagcatcctccctgagcggcttcctcctcttccataccctgccccacaaactgcagccatgtcagtaacctgaactgtaatttctgtttcctccacccaggctgctgttctctgggctttacctccttttgttgctgtttggaaagtgtctccagggaaactactggggtgaattcaaagctcattttcttggtttctcttccttcaaggatcacagtcctgtactgtttgggttcagagccaaaaaaacagttgcctttattctttttctagttttacagttctttatggcagaagggtaagtctgagacccatgattctggccagaaccaaagattcgcattttcattcattctgttactgtgttagtggcttttgaggtcctttgtgatctggactcttgtctagctctccagctttattacaagacttgtgctacctgcatacctgcccccaccatgcatatgtacataactcaagctggtacatgtattttatgttacaaacaatgagctattttcatttctccaaagatgctggtgcttcccccttctctgggcttccttcatgctgtattctctacctgtaacacttgcctcacccctaccatctctcagcttctacatgtttttccaaatcagctgaaatatcacttcctctggtacttctgtcatgttcgcatagcagcctgaactttcccccatcaaatattttatcaaatttcatgatctctttttctttaataggaactgcatttgcctgcttgactctaagttctatgaaggcagtgtgggggatcatcctgcttgattatcacaaacattagtcacctgctattgtaccacttatggaaatgtcaatttcaaatttaggctagtaaaattactggataaacctgctcttatgatacccagagggaatttgcttgaaattctactctattaagctgcacaaaccttgcttatattgcttggggtgtcctgaaatgccttctaactatatggccttcaaggctgattttctcatttctgtcctttaactcctcctccttaccattccctgttgcttttaccatctatatgtattttgggtgctaggtaattattaaagccatcataaacctcgtatctcaaagaaatatattttgttatattctcatgaagacatcccctgaaaaaacagaaccagatttgaaacttttaaaccttttataggtgtttttgtgaccaggaaaaaaactatcacagaattatgttcttacagccaggcgtgatggcttacgcatataatctcagcactttgggaggccgaggcaggtggatcacctgagctcaggagttcaagaacagactagccaacttggtgaaaccccatctctactaaaaatacaaaaaattagccaagggttgcagcccgcatctgtaatctcagctacttaggaggctgaggtgggagaatcacttgaactcaggaggcggaggttgcagtgagccaagatcgctctactgcactccagctgggcaacagagcaagactttgtctcaaaaaaaagaaaaaaaaaaaaaggttcttacaatgtgcctatgagattaggagtgaaatcctaagtacagttcttctgaacaatgtaggctcagaagggttcaaacgaaacaccttgggacctccttagttaatatagtgcctagagcctaagatactgcaatatataagctaaagggctggtaaccaggtggatggaaccatgaagtcgtaataatatattttcatttcaaaaagacagacacacacagacttctcaacagtaattcaatttgaaagggaattcaaatatatacatgcaactgcctattacaggtaatgttacactttacccacgaaaatccccaaaagatattttcaagcaaagtaaaagaaaaaaaaaagtgcttgccttagaaaacagaacaaacaaacaaaaaaagtgcttgacttacgacttaaaagcaagggaaaggaaaagtaagagtaaagggatttgaaaaatacctctctgaacctattctggttctgattcaggaaagtaccataaagacagaaacatacctgaatttatagctttcccaaactgtacacggtacctagtgcaagcttacgagttgctggcacacttcattatttttattatttttttgagacagggtctcgctctgttcctcaggctgtagggcatgaacacagctcaccacagcctcaacctcctgggctcaagcaatcctcctgcctcagcctcccatgtagctgggaccacaggcacatgccaccatgccaagctaaacacttcattatttataagttctttttcttttgagcctctatttaatggacataactttataaagaaaagctacatatcatatccataatcatgttaagttccagcagcttaaaagaaaataactaaaattctgaagccatgtcttaccattgatgtcaccaccaaggctggagagaatcccattgtgagatagaaaaagagttcaaccaccttatatctgcaggaacaaaaatgcagttaatttaacttataaatttctataacacctaacaatttacataccagcctttcctttttacttttgagaaagaaatgtaaactcttaactattcaaataaaactttatttctcagtaggcaaccactaggcctctaactaaaacacagtagctgagtaacaaggaactagcatttctctcagggttgaaaaggcatcaaatcccacatgccacctagaaaatgttttctgccggccgggcacggtggctcatgcctgtaatcccagcactttgggaagccgaggcgggcggatcacgaggtcaggagatcgagaccatcctgattaacacggtgaaacccgtccctactaaaaatacaaaaaattagctgggcgtggcgagcgcctgtagtcccagctactcggggagatgaggcaggagaatggcgtgaacccgaatggcgtgaacccgggaggcggggcttgcagtgagccgagatcgcaccactgcactccatccagtctgggtgacagagcgagactcagtctcaaaaaaaaaaaaaaaaagaaaagaaaaaaaaaagaaaatgttttctgccaaaagtagttatcgtttaacccactccaccttgtaaaatatttcctcttctgatcctagagtgtctgctttcattaccattccaatccagagctagaagtgaaattctgaagatgaatggagatgcagcctggagcctagtttatcagcaaaaaggaacagcaagccctaaggaaaggacgtgtaattttgtttgtctctttattttgcacctgcacaaactgtaattttaaggctcatcacgttagactacaaaagatctaaaaaccctaagaaatacattgtattgaaattcaaattacatttcagcctaatcaaaccagacgataagctcctcaaaggcaggaaccaagattaattatgttttgatctgtaaatcctagaacagtacctgatacaatttaggtactccctaatgtctgccaaactgaatggccaagggtgactcatacctcattcatcgtgttttatactcaaagcctaccatgaaataatcagataggggaagaatgggtttatgggttttgtttacaccagaaggccgggaaaaggagaaaagatagttgcctttcttgacttcctattttatccaaggatataaataagagatttgagtccaagaagcaaaccattcccttggacttaaatatgctataatatataacactactcagcattgctaattatggtcaaaaaggtatttaagtgaatttcagagacaaaaagaagttagtgaaaactaccattttcttcttctgaaaggggaaaacaatttagtattttctgataaacacaaattatgttcaattctgagagccattctgccaagcacaatagatacagaatttaatgaactgtaaataaacccaatgacaaagatttcctggttgtgtgtttctcaaattcaaacatacagggtaataaaaagagcaatggaatcagaacttggatgtttgggtcctaatttccagatgagtcactaatttgatgcatatcctaaatgttctgactttttaatcatgaagttggaataggggaccttgaaggtctcctctagagcaaagatactaaatttcaattagcttttgtttttatatggctcaataattaggactatcagctatgaataactggctaaaaagctgtgccctagggataggatattaagagttccaatgtccttcccaacatcctttttctcaagataccctttttggaataccctctaggcccttatttaggtatattgtactgagcacttaatatctattctctccaatcttcatagacaccttgacaagtggctggttttctcacgtgatgactgaatcacagagaataaggccaatttgcctcatgctatagaaatgaagtctgatggactccaaaggggctggttaccatgtcccctcaactacattataccaaacctgtaccactcttgtttttccacagcaatctttccactaataatgaataccaaatggttttgaagatttattaaaaataacatattctatatatgtatttctactgttttgaagtacaaataaaagtaaattgtattgcagtgcagataatatttaggcagtcaattttaaaactatcaaatgtaaattattttctcttacttttcatggtagagaaatacataaatggttcctccagctgccatgagccagataaaccaacgcatatgagatgccaggggtccaagttcacgaagatttaacctaaaaatgtaaacgtgacaacaaagaacagaagtgataaatgaagggaattcatagaacctgtgtcattgaaaactgagaaagtcttaggataagagcaggaagaaaacacactcaacacatcaagcaggcatttgggcaatttaggtaaaattaagcaactcaaaaacaaatttgtcagtcgacctttaagactcagaattaggccgggagtggtggctcacatctgtaatcccagcactttgggaggccgaggcagacggatcacttgaggtcaggagttcaagatcagcctggccaacatggtgaaaccccatctctactaaaaatacaaaaattagccaggtgtggtggcatgtgcctgtaatccaagttgctcgggaggctgaggcaggagaattgcttgagcccgggaggcagaggttgcagtgagctgagattgcaccactgcactccagtctgggcgacagagcaagactccacctaaaaaaaaaaaagaattagtttcaacatggtttaaaaatagaaccagctaaaagcagacaagttgaagggagtcccagcactcttatgacgcctaacttaccctattaggcagaatgaggtcaaaactgcttgccctttaatttctgaccatgtatttgggagcagattacttacaaaccttaatgagaagaacctggaacaaaattttgacgcaggatcagatacccacagtggatacctaatacacaaaccaagtgtgtctccattatcagtctctctgccaagagagagtatgagaagaattattcctaacatgtattatggaagacattttggtagaatttaaccatggactgttgtgaggtttgaattttaaaatgctgcaaattcatttgtactaatttcatattaagaatacatgagaagttcaggaacagtggctcacacctgtaatcccagaactttgggaggccaaggcaggcagatcacttcaggtcaggagttcaagaccagcctggccaacatggtggaacccagtctctactaaaaatacaaaagttagctgggcatggtggtgggcacctgtaattccagctactagggaggctgaggcaggagaatcgcttgaacccaggaggtagaggttgcagtgagctgagatcgcaccactgcactccagcctgggtgacagaacaagactctgtctcaaaaaaaataaataaaataaatgaggccaggtgtggtggctcacacctgtaatcccagcactttaggaagctgacatgggtggatcacctgaggtcaggggttggagaccagcctgactaacatggtgaaaccccatctctactaaaaatacaaaaaaattagctgggcatggtggcacgtgcctgtaatcccagctacttggaaggctgacgcaggagaatctcttgaacccaggaggcagaggttgcggtgagccaagatcgcgccattgcagtccagtccagcctgggcaacaagagcaaaactccgtctcaaagaaaaaaaaaaaaaaaaagaataaatgaggaagaaacaaatgttgtcctgattatctataactacaaaagtcacatttccaaatggaaaaagtacagcctacatatctaaaactacaggtaaacaaattgcctactatgatatttaactcctcagctcacatttaaattaattttattcatttacttattttaaattaaagaatttaaaataactaagtaaggaatcctgtttggaacaccctgtaggttcctactgaaataagcattgttctgggcatttaatgtccattcataaaagcctttcagtgttcttcttccaacatgaagccgacctataatttagtcagatgctgggcaaagatagcacttactttttactccttcagataatcaggtttcttttgaatcattgatgctgcattagtcagaatctagaggcatactgtttctaatgactacaatagatgattgcaaaatataagcttctgagtttttaaaactggattatgtcttgtagaagaaagctaatgtttctttaattaagagtttcaaagcaacaaaagattatatttgatcagcaccaaaaaggcagaaagatcaaaggcaatgaacaggatactaggtattttaaatggttctcttactcagcaaaagaaatgataaacacacttgctatatagtagctactgcacttgaggtgaattgaagacaaatggcttaagtttcaaaaacaggctgggtgcggtggctcacgcctgtaatcccagcactttgggaggctgaggtgggcagatcacttgaggtcaggagtttgagaccagcctgggtaacatggcgaaacctcgtctctactaaaaatagaaaaactagccaggcatggtggcacatgcctgtagccccagctactcaaaggctgagacaggagaatcacttgaaactgggaggcagaggttgcagtgagctgagatcacacctctgtaccccaggcttggtgacagagtgagactctgtctcaaaaaaccaacaaacaaagaagccagatgtggtggcaggcacctataatcccagctactcgagaggctgaggcaggagaatcgcttgaacctgggaggtggaggttgcatgagctgagaccacgggccactgccactgtactccagcctgggcaacatagtgagactctgtctcaaaacaaacaaacaaacaaacaaacaaaaatggccaagcatggtggctcatgactgtaatcccaacactttgggaggcagaggcgggcagatcacttggggtcggagttcgataccaacctggtatcgacaacatggtgaaaccctatctccaccaaaaaatacaaaaattagctcggtgtggtggcacacgcctgtagtcccagctacttgggagaaagaggtgggagaatcacttgaatctgagaggtggaggttgcagtgagctgcatggccaacacagtgaaatcccgtctccccccaaaaatacaaaaattagctgggtgtggtggcacatgtctgtagtcccagctacttgggagaatgaggtgtgagaatcacttgaacccaggaggcagagattgtagtgagctgagatcacgccactgcattccagcctgggagacagagtgagaccctgtctcaaaaaataaaaaaataggccgggcacggtggctcacgcctgtaatcccagcactttgggagatcaaggtgggcagatcacttgaggtcaggagttcctgaccagcctggccaacatggtgaaaccccgtctctactaaaaatacaaaaattagccaggcatggtagcacgtgcctgtaatcccagttactcaggaggctgaggcaggagaatctcttaaactcgggaggcagaggttgcagtgagccgagattgtgagactccatctcaaaataaataaataaataaataaataaataaataaataaataaataaataagcttgctttcctcatacatatttacagcatttccacttgaataattcaattttctagtgttctgaacaatagcagaggtatagggaaacaatatggagagcaaaggttacagatttcaagagtgagcaagctatctgcacacaagttcatagcacttcttgaacaatccaatacccagatattataaacagcagcaatattctccccttcaaatatgcaatctgacccaagtacatcaaatggggaaaaaaatgcatgcatgtatgtgttcaggaggagggaaggtggtgtacacatgagggctgagggtggggacaagagggagaaaggaaaggaggagtgaggaattctaatcataaaatcactaccttcgaaaataggaagactgtatcttaccatggagcataagaagcagcaatgaagaaatagataaccattctatcacacatgtgaaaacaatgctccactgtcctagcgagggggaaaaaaaagtaaatttgtcagaaagtgttcagatgggaagtacgggttatcactccactatgttgcaatttccattcttgttctagttctcatggcctttacacttgttcttccaaggttacacagatttttgttgctgttaatgttatgaagtcacgagtaaaagctttctgttattttttaggttgcacatacaatagattctctcagcatatataagacatagggacagggccccatgatagttagaaagcctgaagtggttaaagcaaacaaacaaaatctgtctttttctgatgttttccatttcttttggatcccctctaacagaaaaatgaagttcctggagggcagaccacctccccgcaacctgccccagctcctatcagtgcagggcaaagtcctgatgttcagtaaacactccctgagctgaaatcacattctttgtgtctttttagaaggtatttacagtttttacttcaaatatcctggtgtggacagtaaatagtaataaaggaaattcagaaactaacttaggaaaaacagtaacaaaaacaaaaaatggcacatttactacaaaagcatagccacctgtatttctaagcaagttcctccttccaaaactgaaaagtcagaggtatatgtacaaagagtttggttcactgaggtctattcataaaatggattagatggaatttgccctttactgaggtaatttaaaagtacaaatttgtaatatcatcttgaatctattttcagtgtccaagtaggtataactataatttgagggaacgctagtattagactttcctccccctacacgtaacattgaccaaagcaaataataaagacttgtgtgagtaagtgaaaaaacataccccataaagcctgggcatggtggctcacagcaataatcacagcactttgggaggctgaggcaggtggatcacttgaggtcaggaatttgagaccagcctggccaacacagtgaaacactgtctctactaaaaatacaaaaattagccaggtgtggtggcgcacgcctgtagtccaagctactcggatggctgaagcacaagaatcacttgaacccaggaggcggaggtggcagtgagctgagatcgcaccactgcactacagtctgggcaacagagtgatagtctgtctcaaaaaaaacaaaaatgtattccataaatatatatacctaccgtgtatccacaaaaattaaaaataaaaaaaaagttttaaaggaatgaaaaatacatttgtgagaaagaatgggtttcagtctactagtcatcagaagctatagcatacccatagatgatactttatgccataggtctaaagaagcaaacattacgtcaatgcttttcaaacttgactgcatatcatcccctggggagcttacaaaatacagtgatggcctccagttcagaagattctgaagtgctaggaggtgagatagagggtggaggaaggagaataagtttttaaaactccttggatgactgtgatttctagcaaggttttgggcctttctaattctgttttctagattgtcatacgctgttagagtaggtagacaacagacctggaatcttatccaaaatctgccaccgacctctctgactctcacttacctcataggtaaagtggaaataagatctttctcatggagtatgtgtgaacattaaatgagataatgtaggccatgtatctagcatagtgcctagcacacaggagcacctaccacataataaatgcaaattcccttctcacttttacttaaataaggcttttttgatatttagaaattttaatgaggagcaaaaatctacacatggcatatgattctagcaatgctattcaaagttaaagagaatctagtttctattacacctctggcagggagacccagaatactgaagtaggtacctacaactttttattgatccaaaatctagacatcgaagccaagtttgctgaaacaaccacaagcactaaattgtgccaagaaggtaatatagtactttgcatctaaactggcctctgggcgctgcgacagtgtgtcctaaggagccaggacaggcacttttgtggttctcttgtgagtgtgtcccaaagtgcccttgtgattcaatgctgtggttttattttaagcccaggaaactgtcaccttacaggaaaaggtagcagactgcaagctatatgcaatattgtaaaagatatggtgaaaaaaactaggacttggagtcagaggtcttggaataatcagattttgccagtttcactgactcagacaagtcaggccacttctctgagcctcagttcccccaaataaaaatgaagtgatttgaattagatgatttctaaagatcctcccagctctaaaactctaggattctgcatgtgaggaaaccagtaatcatctcataaatctcaaatcctgcttgtaaaaggagcatatattttaaatatcagattgtttgaatagtttgagttttttttggacgttctttaaaaccaaaaggcatattcgagtatttctttaaattgctcatagtctgctctgaaacttccttttttgaaaagaagttttgccctttagggttgtgcagaatccatttcacaagcaaaccattcccacctaaatggtgtggtgctccaaaatcaatccttcactcagaggaggaaagcgtttacgttcttctcattggcaggccaagagctatagtattgttttgaaagtgcttgactattaatagcaaaatacgtgaactctgtttgaataatatacacaagacttaattctgaaagctaaactttgcaaaatggtaaacgcaaactataagtataccttcatacctcacacactcatagggtcttttgtaattttcaagttattttcaagtaccttatctcattcacctatcacactgactgtgtgactcaggtattattattctcattttagtgatacagatactgaggctccacaaggtcaagtgatttacccaaaattaaagagcagggctgggcctcaaagcctgcctgctgactccaagctcagtgtgctttgtcactaccccatagctgctgctctcatcatatccttagtgtgcttgatagtactggaaaatagctctcaggtttttaagtggtaagtcctggggaatcagttaggttttgtttggggttactgagcaaaggcctaccttcttagatgcctgctggggaggagtcctaaaacttcatccagtccaaagaacaagtcctgaataatgggatagtattctagtctacaaggcagaaaaatgtctactctttgccctacttgactaaagcatgccagcttggaagggtaccaaacacgttgagtcaactatttggatctgttgaaacagcatgtcatccactgtaccttaagtggctctttttccatgatacaatgtgaaatactgtagaaacgatgaagagggcacagagtcccattccataaatccatgctgttatcttttcccagcagtcatcagacagccgatggaggagggcactgcccacgatggccggaacaatgaggaactgagggaaagataaagaatggtgaatggaatattctggcttttatggaattgagtcttttactaaaaatacagagctttaccaggaacaattttagtaaaataatcttagagcaagtatttgtctctcctggataatcataacgagagccagatgaagttagctgctacactggaaagcaggtaataccactcagggtccaggaattgtgccaaccagtggggatacaattaagccatcaaggatgcaacatcattcagctgttgcaaaacagatggttttttttttttatcctaatttcattaaataaggacatgtttcattctactttataatctgatttagagtaattacttaaaatattcaaatgccaagcaggcagggtgtggtagctcatgactgtaatcccagcactttgggaggctgaggcaggagaatcgcttgagccctggagttccagaccagcctgggcaacacagcaagactctgtatctacaaaaatttaaaaaattcgccaggcatggtggcaaacacctgtagtcccagctatttggcaggctgaggtgggaagactgcttgggcctgaaaggttgaggctacagtgagccatgattgtaccactgaactccaacctgggaggcagagtgagaccccatttcaaaaaacagccaagcatatactcagatttttcagggaggtcctcattttaaaatatctgtcctattgcaattgaaatctcaatatttcaggacaggataattgaacaaatcaagtaataggtattataatgtacatagcaacacacacatacaaaaagtcagttgttgaagttatataccctgattttcagtttggatctgtacattccaccaatttgagagctactgcagaatgtaagagttttggggtcacttcatttttaacagagccttttaagtaagcaagagcaaaccatttccaaggcccacctattcaaaaaatcttgagaattttagagagatttgctttctgcatcatatttcatagtccacatggtcacaaactttaatgtctagtcatatgtgtatgactatgactagtaaacatcttacaatgacagaagctcccaggagaataaactactttattagatattagagtaagcatacttgacaaagaatacaaatgttagcaatttgcttatcttttttctccccaaacctacatttgtcaccttgcaacagactattaaatcccctagatgagactggcatgagtttttcagatgctgaagttttcgttggcccaagcaaaattagaacattaaatacaattgcatctcctccgggaagcaatggccactgtaggggtgagagtctatggctcgccttcctatttcagaggatttaagtacatttaagtacaataaagtttttcataaaacaaaatgtatttcatttaaaggaatgccctttatcttgagatcatgtccttactacttttcatgttaaagtatcttctcttcaatgaaatgatgacaataggggtgttttgtctgtgttagaaatattactggtccctgaaatccaaaaattcaagatacggtttaataagattatattttctgttctaaaaaaattaatatgggggttttgtcaggtctccctttacttaagtttacacaagtgttccttaacctgtgacacactcagaagagacaagttaaggtttattcaggttcatccgagtaaatattattcctaaaggtaagctgtgtgtttcaatatctgaaccattgtattgtaccaacagtgactaccacagttaaactagcctgttccaaacactcattgttaaagaagcaaactggtcttttctctatttcttgttttcagactgtatcccagccactatttttccctcaatgtcactaaatgcaagggaataatgaaaccacaggtaaagtaaaaaatttataatgacataagaaatgccattaatgtcacattaacaggaaaactgaaaatacatacatattcacaaacacccccaacacagagacacacatatacacacacacatacacacaaacacacacacaaagaaatgcaccgaagtgttaacagtttatttctggttagttttgtttttcttatatatttttcagtatttttaaagtttcttataataagcatgttttgcttttacaaagcagaaaaaaattaacaaaaaatttagggatcacatcggctttttcttcaccaatatggaataacatctcctctgggaagcaatggccactgtaggagtgggaggctatggctcccctccccatttcagaggatcacttaattttaaaaagcatctttttcaacaaactgtgaactctctttgccaaatgaacacagttgattgtcttgaaaaggcgattcatttcattctaggggtgacagtcttcataaataggtgtctttggtttttctataactagggtacatactattattattcctttaaagaatatcttgttggagaaagcgaatccaggacagagctgactgtaggttagaacacacaaagcattctacatgcttacatagtttctggtgacacgacccagaactgatttcctggtagataaggtcacagatgggtaaatccaactaattgtgctgaggttactagagataactaccccttcctcccaccaaagccccgtggaaaggatggcaatggtggaaaacttgtactcactgcgtgtgtgtaacagttagcagcatgttcatagcaagttggcttgtagcggccattggctggagctcgatggttcatgaacctgtaaaaacaaaaagaacacatgtaagaaaaactcaaagtgtgtgaagaacaatgaggaaacccaccagtgggtatgtggtctattctacgcaaagaagtgactggtggaaatacccagttgcggtaataaagccaaagccactaaagaggagtaaactgagccaatagcaatgatccttaagcaaataccctagtttattagattaagccttctttcagtttattcaaaagaaaaaccttccataaccaaaagcaaacttctacaaccaaaagcaaagagaaaccatatccaccccttcaactggaaccctcctcctccattcacacacacacacacacacacacacacacacacacacacacacggtacaactagaaaaaaaaaacgaatttttctaaattttattgtcatttagtgaaaagggatacactacatttgaaaaacaaagtttctattttctctcttaaaatttataaagctttatataggcacatctttaaaccctacatcccatgattaacaggcctgtcccactagtttccctatattgtattaccagacagcttaaataaatgacacctggctacctctaggcaacttaaaaccggaggtatgttttcacctttgttcttcctgaaatcaaaaagtctgcttcaaaaaccaaacacatgactactacctgattcttttggctataaaattcatatatacacacaaatgtgtgtacgtatctaaatatcaaaatctgttacatatatagacatatgcccatattccgcacttccctttaggctaactttgtgaccatcagtagtacagagaaaagcatgaataccacagaacctaaagagaggatagcattcttccatttcagtatgctgagtgaggatgccctccccaccaaaaacccaacccatacccacaacaggtttcatgagggactctggattagtctaattaatcctttttttctcaggagagaaaaaagcagctgtctgaataaaagaagaaagaggtagatgcacagaaacagacggacgtaaaaaaaaaaaaaaatttcaacagcattcaggttgcagaggtccactgcactcctgtgcttaagagtctgtaagacgtcaacaggctttgcacaataaataatccttttgctcaagctagtttaaagaagtgtgaatgggggttgggggttggtattttgtgccactaatgagttctaactactcattaccttattcatacacaaaataaaaaatggtacagggctgaaccaaatggtagaaccaagttgccaaaaattggctaaaacgcatgaccaagccattttagagagtgccaagtttattaataaaagaccagccaatactctttccctgagttaggaagagcctgttatcgttagatcaaataaataaaaataaagtggcagccactattaacacaatacagatagttcaggtggaaaatccactggggaatgaatttgggacagtgaagatatttcacttggcccactgatgggttaagatatttaactagtgtacaaaatatgtacttactgagtataatctaccagatggtttgaaaaccaactgttaaagagaaatatacagttagtagcttcaaaatttatccaagctattctcaaatatagttaactattattaagcatcatcttttctcccctgataatattttaaataattttactaatttcctaagagacaagagtgttgctatacagctcttattagcaaaaaagaaaataattacactcttgggaagaatgctttaaaagtgtcccaagaattggaggatataccacatcattgtcctgagacataacaacagagctataagtagcataccctattaggaattttcaaggctaaagagcaaggccccaagatggctgtagttagatgaaattgaatgtgctctgtgtagggtgcagtaagtaggatttgtctacccaccaccaggctgcagactaaaatagcaatttatatctctggcagcccaatctaaaaatagtcaagccattacccagcaacagggatagactttcacattttctcctaaaaacaaataaactggatggccatgtttgtgacagcttagtccctgatcacctggaataattcacattaaaaaataaaagtagaaagttatacagaaaaatatcccacccatggtgacttaaggcactctatcctgatgcacagggtaagacacgggcaatagggaaagataagggtaactatcctggaagcaattctctaaatctggggctcagtaggatagacagcataattgttctgctgggaaagtacaatacaattttcccatttctctctaacctgccagggtgcaatcaagcctcctccacagcctcctgaagaaatcactcctaaaacctaaatggaaaagcagatgtaaaatgtaaatcaactcccacactctggccttcatctcttccccgaaaaaagaatgggaaaggttcaagtgctggttatggaaaacagcatccatttatggaagacatctctatttaaagcggagtggccctaatggttactcaatgcttgagtaaccaacaagctctagagggtttgaaggaaggtgattcagtcctgggagtgggagctgcacttaataaagctactagttaggcagagtttttttactcattccttcactttctctttcaaaactctcctgccttcccccttgcccaacgttcttatcacctcctccttcccccatacccctctcccatgccatgacagaatttcaaaaccatggagggaaagaacagatcagagacctgggaacactccttagcacactaacacactttaaattcaacctaaagcactgtgcccactgagtagatctgcaacccaccagcagatctcagaggctgatctcagtagatcaaatcccacaagtgttcctcattctccgagtgcaagtaccatcaacactaccttcaaaatatatttcaaataagtccacctcatcacttgaggtcaggagttcaagaccagcctggccaacatagagaaactccatctctacaaaaatacaaaaattagcctggtgtggtggtgtgcacctgtaatcccagctccgcgtctcctaccttaaataaagacctaacatctcaggtctgtacaaatacaaagtctcttaactagtcttcctgcttgacccagtacagactctcttctttacatagcagctacagttttccattagaaacagatgaggggctgggcatggtggctcacacctgtaatcccagcacttttggggagctgaggcgggaggttgcttgagcccaagagtttaagaccagcctaggcggtatagtgagatcccatctctacacacaaaaaaaaatgtaaaaattagccaggtgtggtagtgtatgcctgtagccccagctacttctgactgaggtagaaggactgcttgagcctcggaggtcaaggctgcaacagtgagttgtgatggcaccactgcactccagtctgggtgacagaacaagaccctgtctcaaaaacaaacaacaacaaaaaacccagatcacatcacacaccccaatcccagcttaaagtctgcctctggcttcccaaagtgcttacgatagcactgtaacacagtgttcagaggcccacaagccctgagtggtctgggcctcactacccctccagtctcagggtggcatctttctctctctccatcctctggctataccacctcctttctgctccttaaacacatcaaggttgtgtctgcctctgggcatgtgtacttgctgtttacttctgtctaggatattctccagaatgctcagctctcttctcatcctttcagctcagctcagatgtcacctcctcaagagaggttttccagactatcctaactgaagtatcatttcaaccctccccatccaaccagagccctatgtcacaattggtaagactttgatttgttttagcttattttttatttcatcttttcccactgtagtgtgaattccatgaaggctgtcttgttcacctttccattaccaaactgaagtacaatgcccagcttattgctagagcttaataattgttgaatgaatagaaagacattccagctactgctgaactattttgtcttaacaaagatatcccatagtcaattagttttactgtggacacagcaggttctgtaagtaagagaaacaggcagccttggaaccaagagaaccccgaatctcacacacacacaaaaacacttaaaatccaagacaacggatattccaagggccccttcaacatcatttatgttgcaacgtataagtggacccctcttactattagctcccctttatgactgagcatatttgttcaggaaaagtgtctactgtcaatagtgccaatcttgacttaattattaaataaaggaagatggcatatataaggagactaccccatgcctatgatttagtgctttaagaacatgggaaaaaagacaataggtagccctgtaagacttctaatactgtagattaaaatgctttcccacatatccagttttgaagctagctgcatgatcatgaggttggggctgaggaaaagggcttctttttccttggatttttggttgcaagactgttgaaatgagtacacaccaacaagaagatacagtagagctctgtggatcttatgcctataagatctgtgtgcccacacacagatgtggtgtgggcagagagttaagagagagaaagaggtgagctagcagcatgactggttgagagacagacatgaagttgaactcttgggtctaccccttcctagctgtgtgactatgggcaagttccctttcattctctaaacctatttactcttctattaaatgggtataacatttatgtcttccagagttatagttgaggatgagtaatatacaagtgcccagccagtgcctggcatagataaatggcactcaataaatattagcagttattgccatcaatcagagatgctatgaaggggagaggatgactttgtgtttgtctatgtgtgtgtaggtatcttggggatactcaagtgtgaaacataaaatgaggaagataaaatatgcctctgtgttccagtgaaatttttcacatcctaagtttgttaagaagccatcattgcataaaccctcctcatgctcctccatccagtcccaataaatctatcaggagggaggaagcatgtctcccttcaaagacagtgtgtctctccctccagttcctttgcaatttacctacctgggaatgctcagaaagatatatcatgaacacagcattaaaagatgcagaatagtactactctcagcattttaatgtgtgaaccacaaaaatcaggacattctcattacattactttttgtttataggctttatttccaagttaaaattgatgcttagaactatgtttccaacctagcttatgatagaaaaccaagaaattatgagatcacacaaatcttcaaagaaaatcagggtagatctagatgtcatcaagaaagaaactgttaaatatccattgagaaacacacaagcccccaagaaaattacagtctatgccacaccaaaagaaaatacctgtatttttagtttttaagtgaataatagcgcaaaaatcacattacaactgtgctaataaggaatggagagatcagtgtccagcaaaaataattaaaaagtcagttcaataagctgagagggtagcatcctaaatgaagttgttgttgttgttgttttaacagttttaacgtttgtgcaacaaataattgaacagggtttgtttgttttttttctttttagaggatccaaaggtataggtaagaatgacaaactcttaatcaaacaaggaaggggcaatttcacagaatattgccactgttctctgaaaacaggaagagcacagacgtgtagagaagtaaaaccaaatcaaaccgcatgcacagggcttcactgatcatgactggagtgcatgttacattctctctaaaagcccctccggtcttcatttctgacatcaggttctaaagtcagaacactacggttccattttgcccttagacacaccggtatgaagttccactgggggaacagtgccaagcattcaacaccctgactgataagcaatatattcagaagtcaatccaagtcttcaagctgatccccttcctggtggcccagaccatggcaactcttctgtgcatttgttgcctcctttaccctttgggactgggggaggaatgagatgggtgagagggcagtgagggcatggagattggaaagaaaaaaaaaatgtgtactttaaaattctgaaataaaaggtagtgtctaaaaactcaacaaccttcttggaagatttcatgcatttcttaaaatttcccctgtcactgcacccccagcaaacatgctggtggtgaaggtccgggaattcacacaaagggatgcagttaccatatgccctggagaggtgaactttcacccacttaaacagaaaagaaaagcccggagttcctctcagagtcatgggctaacctccatccattgttagacggtggagccccagaggggagtaaggccacggcgccccccagcccggcatttccaccagctctacagtgaatgagcagtcggccagccttccggtggcgcctccacggttcctcctcctcgtttcctaacaccggcgcctccacagcaggtctcgccacccgaaagctaacatgccccttcgcagagcccaaaaatagcaccgccctgggacgttcagctggagaaccagcaaggcccctacacggccaggcagggctaagctggcggagcgtgcctcagtttccctgttgctagggccgttcacaaagcacccaaaatgcctagcaccccgctttacgacaaatctctccgcagggcgccaccccgttccgcgcgccccgggagacccccaccctggaggtaaagggatggaggccaaagccaggtcggaggactcgggggcggtgcccggggctggggttcgggttcccagagagagccagagcccagcctgtatgggggtcgggagggtgagccccaggagcaaagggatccccgggaaggaggacaggcttggagtcccggggccgggaatccatctgaggtccgcagatcgcgaggggagacccgggtgaggcaggagctcccatccttggaggaaggggatcgcccagggacagcagggtggggaatccccagggaactgatccctggccaaggtgcgggatccacccaggatgaatccaggtgaggagccgggagccgtgcgcttaacggcgggatttgggaacccgcttctgacacgggcagcgggaccgggacgccatccctctcaccgctggaatcgattcttgaaccgcattgatcctctgctcctcctcgggggccaggagctccgtctcgtcagcaccggcggccgggcgcgcggccctcatgggcttgggctgctccggaggccgcctgcgtgtccagcggaacccttcggccgggtagggtcggagtgggccaggccgggggtcgggacagggctggggccagaccgggcggctgggggcgggagggaggccgcttcaacggccccaacacctcccgcctcccgcctcccgcctccccggctcctccgccccggggctcctgcgccccgccccggagcccggctccgcccccgccggctctgttcgcctgcgtgcacccgcggtcgccggcgcgtcagcgcgccggtcagccaatcggcaccccgagcggcgcggcggctacgctgccattcattcccgccgggctcgggcagcgaggcggggcctcgctggggaggggcggggcgaggggaaggggaggagcgcgggaacgcggcgcccttctgtaagagacaagttggagaagagatcgagggagggagagaagtggtgaaggaggagatggaccaggaaatcttaaaagcattgtgaagaaaatagcagcaaacaagcagccctacctcattcattttttcttcatcattaatttctccatccctcctttcatttattccttcatcattttgagggccagctcccgcgaggctattgtgagaggatccagggcagaatgaaaaacctgtccttgtctgacccttgagggagttgagatctctgagcgtcttctaactctgagattcagtgagatccacaaaaggaggaatcctctgcaaggatccttttatgttatcctccagtttattttttattttattttatttttatccaggcagctttcaaataaacgagttgacttgaatcagggtcctgtcgctaaacctaaactcagagggcttcctggaagagaagttcaaataaaaatgaatgaatgggccaggtgctgtggttcatgcctgtaatcccagcactttgggaagccaaggtgggcggatcacctgaggtcaggagttcgagaccagcctggccaacttggtgaaaccttgtctctactaaaaatacaaaaattagccgggagtggtggcgggctcctgtaatcccagctactcggggggctgagatgggagaatcacttgaacttgggagatagaggttgcagtgagccgagattgcaccactgcattccagcctgggtgacagagtgagactctgtctctctctctctctctcacacacacacacatacacacagaatgaatgaatgggtgatttgtcgagcctttccaggatcactgatggaagttatatgtgttcccttccaggtatcgtgtccatacccagcccccagcctgcaggctagagactctgaagtggcatgaggccagcctgctaggagtgctcattcgacctacagtaaagcattggaaagccagggaattctgtcacccataattctagttccctttccttgaaccttccagagaggtgctttccatgcttcaatcttcccaagagctcctccagatgggcattatccaacttattttacagataaggctgaggcttatagtggtcaataaacttgccaaaggcaaaagtaaggctcctacctacctttcgctaactttaaagacccacctcctttcagtacgtcagactatctctccctgttttaaagcaatacacttctctaaaacaaaacaaacaaaacaaaacttcatctacccgcaccctcaacactaaatcgggaaaatgaacctggaatgaaagtctgcttcttatcagctatgttgggccactgggctaaaacatcagtgcgggaggggaaggtaacaaaggagatagctaataaagatagatgaaaaatagccatgtgtaataacataagaagggttaaaaaataaaacaaggaagctcaattgtaacagatgtaccacactgttgggggattttgataacaggagaggctatgtatgtgtgggaaatccctgtactttactctcaatttttgagtgatcctaaaacttctctggaaaaaaaaaagtctttttttttttttttttaaagggccaggcacagtggtttgcacctgtaatcccaacacttcgggaggtctaggtgggaggatcgcttgaagcctggagattgaaactagcctgagcaccaaagcaagagttcatctctaacaacaacaacaacaaaattagccaggtgttgtggtaggcacctgtagtcccagctacttgggaggttgagatgggaggatcacttgaacctgggccacagagtgagatcctgtcaaaaaaaaaaaaaaaagaaggaaggaaggaaagaaaggcagtgctgatatatgttacaacatggatgaaccttggaaacactatgttaaatgaaagaaaccagtcacaaagaactgcagattgtatgattccattcatacaaaattccatttatatgtcccagaacaggcaaatctataaagacagaaagtagattagtggttgcctagggcaggggaatgggaggggattgagaagtgatggctaagcggtacaatggttcttttggggtctaatgaaaattttctcaaattgtgataatggacgtacaattctgtgaatatataaaagccactgaactctacactttaagtgggtaaattgtatggcataggaattctatcttaataaagttgttaaaagattttgaaaaattttagtttctgtaaaaaggttgaaatagaaatatctggagcacagagatcgtcttattcatgtttgtatttcttggatacttttaacagaaactgacacacagtaggtgctcaataaagttattcatatgaacttaattaaaaaataacaaaacgacaacaacacaatgagccaacagatgccagatcacatcttattagtgatgtaggaatgtgcagagataagaagtgaactgagtatgatgagcataatgaggaagaggtgccagagagaaggaagtctgcagatggattttgattgagatgctggatggtatcacttagcacaaactttcccactgggagaacagcttgaacaaggaagagaagtggttggtataaggaaaacttttgagaggctacctaagtttggaaacatcagtgagaatgatacttacccaaggaaaaagaaatgaatgagataaaaagtcagattaaatcagatgaaataaaacactttgacctacagtggtctcttccacagaaatgctggactatcaactaaaggtgacttaaacaaatatggtcgcaattttaaattaacctcatctttcctgaaacctacccccccaaggtaaaagcaagccacaaaagataaaaagaaaacacaagaaacaggtttaaatgaatcatgtaaacacctgccacattttttttagtgaggtgtttagtgaatctgtttctgaggagcaatcccaagtatgattgcagcaaagaggtactcaatttgatttagagattagtgttgtgagagctgaagacaatggaaaatgttttgcattagcagaatgtgacatttttgttgagctcagagttacagttcttctttctgcaaaactgcagatgtatatttgcatgggcatcgcctgtgcctataagaaggaatttgtgatagagctaactccaggtgcaatagaacagatgccagaggaaagttttaggagagcaaacacctgctctgctcacggagggatacagagttcctggataggatgccattcatacgaggaagcaagcacctgggacctgctcccctagctctgatcatccaatctgaaagtagcagcttttctccaaactttgactccagacacctccggaagacttgactgaacttccagtctcctccggtgttctgtaactggctttcaatctgtttttttgtttgtttgtgttttgtttttacaaatatgaccgaataaagcaagttttaaaatgaagatgctcccagtctttccttcttttctgaaaagaagaatgtcgtcttttcctacttggttttctgcccacagtcgctgacctttgagtagtgcttctgtctctcatgccccattgctagacttgcttgataaaaacaactggataaagcaatgggaagaaaaaaagatctacagaaaaagcgaaggacttaggtagatggtctatatttatcaccctgataaagatgaataagaaaagaaatccatgctctgggagatattggtcaagatgttttgagaggtgggttgggatttagcaaaataggaggattcttaggattgtgagatataataataagaagaagaataggaaacgggttgggagaagttttactaacaatctgagttggatactctcatattttccaagaagtagttttgagtccttttttttttttttttttttttttttttttttgagatggagtctagctctctctcctggtctggagcgcagtggcacgatctcggctcactgcaagctctgcctcctgggttcacgccattctcctgcctcagcctcccaagtagttgggactacaggcgcccgccagcacgcccggctaatttttttgtattttttagcagagacggggtttcaccatgttagccaagatggtctcgatctcctgacctcttgatccacccgcctcagcctcccaaagtgctgggattacaggcgtgagccaccgtgcccggcttgagtcctttctaaaaattatttttggctctttggttgtatttatttgaaagttacttcttttagcaactggactacatggaaggaggatgtacaatgtttgcacagattaattttttttttttttttttttactttaagttctgggacacatgtgcagatcatgcaggtttgttacataggtatacacatatcacggtggtttgctgcacctatcaacccatcatctaggttttaagccctgcatgccttaggtatttgtcctaatattctccctccccttgccccgcaccccacgcagattttttgaatgcttaacatggttctagaaattttacatcgattatctcattttatccttaaaactatgctgtgagatagataatatcatgtctgttttatagatgaagaagtgaaagcttagagaggttttgcaaataacataaatgtgtattagtgaaaaagtcaagatttgagcccaggttttctgactccaagctcaaggctttttccacccatgcctcgtcacagtagatgattatgtgtcattactcactgcatgaagcagcgttctattctcattgcacaatcaataaatgacattctgttggctgttgtggttgttttccctcaaaaaagaacatttgaatgtaagcccctgactgcctcatgacatattctgctgaggattgagggtcaggattgcttcagctctttcttcaaacagaggtttgaaaggcaataagaataaggatgggaatgtcagtgaatgcaaggaaggcctcaaaagaccaacataaagcaaaagttgatggcaatggttctcacaatgtggtgcagaggccacaagacacattagataggggctttcctattggtctgtgtgaaactcatgtctgtgcttttgttttggccacagagaataaagaatcatatttaacacaatgtagatgccccttatttgggctcacttagccacttatcttgatgtttctttctttcttaggtgagggtagtaagaagccattgggaatagtcagcctgtgagttctttcattctaccaaagtcaactgtgaacagaaaagatttgagaatcttagtgtctttgtgtggtctcagttattctatttgttcatgataaataagagttggtggtaaagatgaaaggtaatttctcttgaagtgcgaaaagcagagtatgttggtggaaatgcccatgactatttctaaactcgcacacactgaaagatgctgctctgaaacctcaccaggtgctgtagagggtccaggtagatatcatcacccatttgcaatctaaatgcaactgagcctccttgggcaagtcctagtacctgccttaatgattctggaagaatcacaaatttaaatgagtctctaaaacaagggtccccaacccccaggctgtggactggtaccggtccatggcctgttagggatcaggctgcacaacagaaagtgagctgtgggggagtgagcattaccacctgagctctgcctcctgtcagattagcggtggtattagattctcataggagcatgaacctcattgtgaaccacacacgcagggacattagagtctcacaggagcacaaaccctattgtgaactgagcatgtgaaggacctaggttgcccgctccttatgagaatctaatgcctgatgatccaaggtggaacagtttcatcctgaaaccatccctgactcctgatctgtggaaaaattgtcttctacaaaaccagttctgtccctggtgccaaaaaggttggggactgctgctataaaagcacagacaagtaatgtcaattgttactaaaatttcttgtgaatatggagaagggaaatgcattgcacataactcttaaacatctctgtatctctctagttctctgtcatatggcagctaccatatctctttctctcaaacaaccccatgtttctatccagcatttcttccccatgccagtggggaaaatcccccacctccagaagatctgtaagaagaatacatttctatctcgtttataccactcttacttggggcttttgttacatacagtttagcctaacaaatactgtgagggatgctggaagcagagtgaccattttaaaacaagagtatcggctgggcgcggtggctcacgcctgtaatcccagcactttgggaggctgaggcaggtggatcatctgcggtcaggagttccagaccagtctggccaagctggtgaaactccatatctactaaaaatacaaaaaaattaaccaggtgtggtggtgcatgcctgtaatcccagctactagggagactgaggcaggagaatcacttgaatctgggaggcaaaggttgcagagagccgagattgcaccactacactccagcctgggcaacaagagcaaaaatccatctcaaaacaaacaaacaaaaaacaaaacaacaacaacaaaaaaaaagaggataaccatccaggcaagcagtaatgaaggccagaaccaaggcaacatcaatggagtggagaaaaaggataatctgagaaagattaagaaattctttctttctttctttcttttattttttatttttttgagatggagtctcgctctgtcacccaggctggagtacagtggtgccatctcagctcactgcaagctctgcctcctgggttcatgctattctcctgcctcagcctcccaagtagctgggactacaggcgcctgccaccacacccagctaattttttttgtatttttagtagagatggggtttcaccgtgttagccaggatggtctctatctcctgaccttgtgatccgcccatctcggcctcccaaagtgctgggattacaggcgtgagccaccgtgcctggccaagaagttctttatacaaagcctaaatctgtgaaaactctttagagccaaggagggataaaattccacccatgactgcttctgtgtgcattgcattaaattcacaatttagcaccatttaaaaatataaatctaatgagtaaagagaaacaaaaataggacacacactcttccccagatccagctcagatttgctgcaatacagatataattaaatcagtgtagtaacttcacctattcagaaactgaggaatctttttgttttggaccaactgaagggagggcaagctgaaagctaacatacaaattctagaataaagatgtgtattttgagtccataggtcaccaacttcgtgtcaacaaaaatggtgacaatgacaagtcttaagagataccttaatgaagaaataacattcattttaaactgcagcaccatcattgcttaccaacaatttgctaagactcataatattttaagcaagtggtaagacatggtagctcacatttgaaatcccagcactctgggaggccaaaccaagaggatcacttgagcccaggagctccagaccagtctgagcaacatagtgagacctcatctctactaaaaattaaaaaaatagccaggcatggtggcacacacctgtggtctcagctacttgggaggctgaggcaggaggatcatgtgagccctggaggttcaaagctgcagtgagctgtgatcgcaccactacactccagcctgggtgacggagtgaaatcctgtctcaaaaaaataaaaaaagtgagcaagttaagcaagtgtcctatacttttttctcacttaaagtttgcatcaaaagccgtttcttcacacagaactaagttataaaaaaaaatgttccttaggctgggcccggtggctcacgcctgtaatcccagcactttgggaggccgaggctggtggatcacaaggtcaggagatcgagaccatcctggctaacacagagaaaccccgtctctactaaaaatacaaaaacaaaattagccgggcgtggtggtgggcgcctgcagtcccagctacttgggaggctgaggcaagaggatggcgtgaacctgggaggcggagcttgcagtgagccgagatcgcaccactgcactccagcctgggcaacagaccgagactccgtctcaaaacaaaacaaaacaaaacaaaacaaaaaagtttctttagatacagcttgatcatgagggattttatagtattttgaatgaataaacaagagattaattattaagcacaagttactatgccacgcacttttgaagatgagaactgcaaataactattggctcataacaaccgctcagtccatacccctgcactaagacttgaccaatcatagaatggtttctagcatggaaggcagcatcactgagaaaaccctgcccccttttgagttcctgtcaggaaaatctcaaggctgtcaaaagcatttactgtttgttctcatcaacacctgacaataggcccctaacttccctttcctagcacatgaaatcaaagtggcttacaattctgagtcctttctctgttgctttaaaatgtatacgtatctcctacaactcaggagtatctttctcaaggacctgaaaactattcctttgaaatataatcaggaagaatagggcctgggagtcccagtctctgcgggaggatagaatcctgacttccataattgccagctagcagatgcagccagcctaatcacatttaccctgactaacccttggtcatttttcactttccctgactctgcctgagctgcagttgctcacacttcctcctcccttattttccctttaaaatgcccagttacctttgcacaaatcagaaggcagcccaactctttccttactgtcagtagttgaataaaatctgctttcacctctttaactaatatctagctttgtttatctaagacaagtcataaaccaggtctattcatctaataattttgacattggctttatcatccttattttgaagaggaggaaattgatccaccaagaaattaacttgcccagtgtcacatttgtagttcattagtacttgagtcacagaattacataattattgaactgcaagaaaccttaggattcatcttgttcagccttttcattttatggaggattctgaggatgacaaatttaaatttacaactcttacctgttgtaagagtcagaattggacatctgggtagggttgccagatttagcaaataaaaatataggattccctttaagtttgaatttcagttatcagcaaataattttttagtataattctgccccatgcaatattggttgtttattcattatttatctagagttcaaatttaacttggggctggatgtggtagctgatgccagtaatcccagcactttgggaggctgaggcaggaggactgcttgagcccaggagttcaggaccagcctggaaaacatggcaagacctcgtcgttacaaaaacagaagggaagggaggggagggcagggggagggggagggggaggggaggggaagggcaggagaggggaagggcaggggaggggaaggggaggggaggggaaggggaggggagggaaggggaaggggagtggagggggagcggggagggagaagggaagggaagggaagggaagggaagggaagggaagggaagggaagggaagggaagggaagggaagggaagggaagggaattagccaggcatggtggcccaggcctgtagtcccagctacttgggaagctgaggcaggaggagcacttgagcccaggaggttgaggctgcagtgagctgtgttcatgctactgcattccagcctagacaacagagcaaagaaaaaaaaaaagaaaaaagaaaaaaatatatatatataaaagaaaatatatatatatacacacatatatactcagcattctgtattttatctggcaatcctaccccagggcttttaacttgccggggtccttcccattccataatctaacaaagcaagcttcaaatatcttatcatttatttgtgggaaattgtggtcatgtctgcaagagttacaagacaggaagactatgatttagtgatattgtggttttgatgagacataagacctttctgaagttggggacaacccaatataagtaatatttatgaaggcagcatagttcatttacaaactgtcaaaagacaaaattacaacaaatttaaagatcttaattggcttttgtttgccattctagagttgggcaacacctcattccataaaattgaatgagtgttcctatgagctgagcaggggaggttagcttctcggcaagggctgaggaaagccccaacagagaacaaagagtagattggtgttcaaagttgcttttcttgtaaaggttaaggcagagcaggcttcctaaaactcgcctgtttggggagatggctattatctcttgatttcttggtaggtcagataaacaactcagttccgacatggtagcacagaacattagcacgagtgactccattttggtttggcctggtggatctagtgcagggggagctcagtccaaaccaatggcctcctgtgaattttattcagcaaaataaatctacaacaaaactcaattaaatgtaacatctctgtgtcctgtaaatttaactgtatcagagaatcacactgtctgggcactcaagctaataactatctgtcccatctctttgttgccaagtaagcttctccccaaaacaaacaagagactcgctggcaggaatcacagtccttgttgttgggggtgggaggtcatctaggtccaagtgggcagaaaaggtaaagtctggtgaagcacaaagacacaggaagactgtgagccaagactatggagaacagcccaggagaatgtttctgttgatgagtaaacagaggcttggacaaggtagatctgtcttactgataaagggactggtgcttccagagttgactcattagtgagaacaaaggaatgcgggtattttctggcaatacctgtaactttgtaaacagagatgtgagagagggcaatgccagcgtgataggtagcattacttttttctttactgactggcttaccaccaccgataacagtcacggtttacacacaagcccgaaggaatgctaagcttaaaaaaaaaaaaagttccacgtttgcatggcctttccactgagcctcagtcacaacttttggctggaggcagatggcaggtctaatgttttgttattggttcttccctcccctgacactcattttataaatgaagctgctgaagtccaaacacattaaggaccagttcaaagtttctccgttttaataacttggcagtgctagagctccaataaggtcttctcactcatgatctgcaaagtgggagctggcctgacttgaggactgagcaatgagtgtgacttctgagtccacactgaacatggagacacaggcttttaacaatatacaccaggttctttttatgctccacttatttagctagtgcaaaggtcagtttatcataagcagtgagggttacaaaatcctaaggcaggaaatgtgatgttgccaagccgcaggaattttatagctatggggaaatggggttgtcctgtgtctttctgtggctgcctcatggctgtgtaatctttcatgtatgtttctccctttgctcctaccccatagttgtttttacgtctgtagactgacttcctttgcttactccttggcttgtcagtgccccatctttgagtccttgagacatttcaccttgacttgccctgccccggggaaacatgttttagtatagtggttaagagcatagactctggagataggttgctggagtttgactatcgatttaaaacttcacttctctgttttccacttttctcacctgtaaaatgggggaggccgggcacagtggctcacacctgtaatctcaacactttgggaggctgaggcaggcggatcacttgaggtcaggagttcaagaccagcctggccaaaatggtgaaaccctgtctctactgaaaatacaaaaactaaccaggtgtggtggtgcccgtctgtagctcctgctacacgggagtctgaggcaggagaatcgcttgaacctgggaggcaaaggttgcagtgagccaagatggtgccactgcactccaacctgggcaacagaacaagaatccgtctcaaaaaataagaataaaaaataaaataaaatgggggtaataacagcctcatcttcacagtagtgtgaggagtaaagatattgtccttaagtacattgagcacgtactatgtgccacacagtgactggcacatagtatacactcaataaatacagttgttcttgttgttgttagtattgcaacaattttagagtttatagctcctacttgagtatttttaagtcctaacttgaaatcttagtggagagagacagtggctgagctcatcttgtctcatgaggctgtagggtaggtaggctttgactcaagatggagtggggactgcagtggaacaaagacagatgattcattcaccacttcatcgggggttgtgggtaggaggcagatcttctagaagagggggtggctagcatctaaaatatgcctaatactcagtatgtgctagaatttgttctcagacattcaatatctaattttaataagtgctcaaagcccctgggttatagcatctgctctttcttgccccacttaagctggatagggaactcttcccaatcttcattccaattaagtgctttcttacatcccagagagtcccataaccagcccacatttatcaaatgcctatagtgtataaggcagcatggcctgcactgtgcatattgtgggggcagtgacggtgggagccagtcacaggaggagaaatagagatgaataagaaacaaattctctttcaaggcacttaaaatctggaggaatttacaaaataactctataccaaggaagtgtatgaaaagtatggtaatgaaagtatcaagtatataaagtgttaaggtatcacagagagggatagacatattttatctactggggttttaaagaaagtcttcatagagaaagtcacttggcttggatggtaaaggatgagaagataccaaccagcaaagacgagtgaaaaatatattgcatacagactgggtgaatactatgagtaagctttcagagatggggacatatcatgcccactgggaccacagcagatggtctgattttgttcaagtgtaggttattgacttaatggggaagagtgtattatgtgtgttgaaacattggcattgtcatgaaggattctgataccaagctaaagagttggcgtctaattttctaaacaaggagaacctatgaaaggaggaagggtgggttgcgatgtctcccgcctgtaatcccagcactttgggaggccaaggcgagcagatcatgaggtcaggagatcgagaccatcctggctaacacagtgaaaccccatctctactaaaaatacaaaaaaaattacccgggcatggtggcgggcacccgtagtcccagctactcaggaggctgaggcaggagaatggcatgaaccagggaggtggagcttgcagtgagccgagattgcgccactgcactccagcctgggcaacagagcgagactctctctcaaaaaaaaaaaaaaaaaaaaggaggtaataaaatacccactgtttaattttgttttggttttatgttcttattttgttggctgcatgggctgaaaaagtatgtccatctaagtgtatctttcttccagctcctggaaggtagcaattatgtaagtaaggtggctggaatacttacctaccttatacctgccaggtgctattctaagcactcgatgtgtattatgtcttcacggtaaccctctgatacattattattctcattttaccagtgatgaggctggcactgagcagaaagtaacctggttaaggtaaccacctggaacatagtaaaactggtatctggccccaggcatactgttatgtcatactgtttcccactagttatgaaatccctttgcaacaacaccttatctatctcaaccagcaattctggactgtaagtagggaaaagaatgtattgcaagctatgcacaaggtaatgattttatagtcataatgattcaagatggaggaggcctagataatgacggcctaattatctatagcattttttctggacctgagagatccaaaactcagcctttattcagactaaggatctaggagaaaatccctgcctcaatcaaagaacagagagtaattctctgagggccttcaagcgctgaataatttatgtagtgattcattcccttcttgtgtgaagcttttagtttcaagcctaaagaagatccagacacacaggtgttttcctagaatcacagaatatcagagttggaaggactttaactgttcaagtcaacatccccattccacattcaactcttagatctccattcaattcttagatctcccaataccacattgacatctgtctcaacagttctcagcccatttttccattcccccacactcaatggataacattcacatatgaaatacattacctctgctgatgagatcagatagtttgtgggttctgtacaattcctggcagctaagcttgcaccacaccttttattttctgctcaaagtgaatcaataatgcaagtaattaagagggatgctattacaggctcagccttgattgtattctagagtgcattttaaaagttaagaatttgcatagttcggtatcattattagccaaaattactagtaacaccccactcagctattattggtacataggttttccggatgaaaagtgctgatctaacctatggttgagatccagccactggaagttccccatttccgagggaagcccgtggcaactcaggacagtttttactgtcagcaaattcttccttttattcagcagaaaaatgtttctaactgcagctggccgacaacagcactgggaaatccatttgtctcctgctctgcatcttcccctagtgttcacagaaactgttctaaattttcacaattctcttcaagtctttgactccactttcatttcccatgctcagcaggtgacctcccctgggacatgctaagtgctcagaaagtgtttgcttggctgaatatctcttcctctacaaaacagttgacatgaatgccccagcttctagcccctaacaaaatcttgtgttgcttttcttgcctcaatctcagaggaaggggctgctcccttctatacagcttattcatccacttgggctttaaatctaatcctgtttggctaattcagagacctgcttactttctacccaagtgccatttcctttcctcaaaggataacttcattctgagcaagtgttccattttataaatctgagcagtgaatttaagtcttatcaaagaaacccttaaatctttcattcacatgctgggctatattcttaatttcacttgcatatcaggattacctagggagctttcaaaaatcctgatgctccagagaaatgcaaatcaaaaccacaatgagataagatctcatgccagttagaatggcgatcattaaaaagtcaggaaacaacagatgctggagaggatgtggagaaataggaatgctttacactgttggtgggagtgtaaattagttcaaccattgtggaagacagtgtggcgactcctcaaggatctagaaccagaaataccatttgacccagccatcccattactgggtatatacccaaaggattataaatcatgctactacaaagacacatgcacatgtatgtttattgtggcactattcacaatagcaaagacttggaaccaactcaaatgtccatcgatgataggctggattaagaaagtgtggcacatgtacaccatggaatactatgcagtcatgaaaaagaatgagttcatgtcctttgcagggacatggatgaagctggaaatcatcattctcagcaaactatcgcaaggacagaaaatcaaacagcacatgttctcacttataggtggaaattgaacaatgagaacacttggacacagggcggggaacatcacacatcagggcctgtcggggggtggggggctgggggaaggatagcgttaggagaaatacctaatgtaaatgatgagtcgatgggtgcagcaaaccaacatggcacgtgtatacctatgtaacaaacctgtacattgtgcacatgtaccctagaacttaaggtataataataaaaaaaaatcctgatgctcaggccacaccacaaaataaagaaatcataatgggctgggtgtggtggctcatgcctgtaatcccagcactttgggaggctgaggtgggcggatcatgaggtaggagttcaagacgatcctggctaacacagtgaaaacccgtctctattaaaatttcaaaaaattagccaggcatggtggtgggtgcctgtagtcccagctacttgggaggctgaggcaggagaatggcatgaacccgggaggcggagcttgcagtaagctgagatcgcgccactgcactccagcctgggtgacagagcaagactgcgtctcaaaaaaaaaaaaaaaaaaagagaaatcataatggagtgtggcagggaaggagtgaaaaccaggcattgccatttttaaagctcttccggtgattctagggtgcattcaagattgagaactactagttttaattcaagccttgctgttcaaagtatggtccttggatcatcatcattactatcatgtgagtacttgttaaaaatgtagaatctcagactccatctattgaatcaaaatctacattgtaacatgataccttagtgattcctatgcatattaatgtctgaaaagcagtagtctagaccagactctagagcaggaggcagcaaactaaaatccacaggccaaatccagctctctatttgcttttgcaaataaagttttattgaacgcagccacatccattcctttacaaattgtctacggctgcttttccactacaatggcagagctgagtagttgtaacagagacgttatagctgacagagcctaaaatatttatgaagaggggcagaatatgctacccgaaaacatgccactttgacatgagacttctagctgaaggcacttgaaaaacaaaagatacaagaagtgctttgtaatcttccccctttctttcagaaaacaggagataaagattcccatgtgaaagatgccctccctgtaccaggagaaaaagacaattctttggtggagagtcatagctgagagaattctttgcaaacagaccttgttaagctaattatcttcctttagcctccaccacataatttagttacttttccacaattgcctttctctattcaaacgaataagaccctcctattttctttcttttttttttttttttttttttgagacagagcagagtctcgctctgtcgcccaggctggagtgcagtggctggatctccactcactgcaagatctgcctcccgggggttcacgccattctcctgcctcagcctcccgagtagctgggactacaggcacccgccaccatgcccggctaattttttgtatttttagtagagaaggggtttcaccgtgttagccaggatggtctcgatttcctgacctcatgatccgcccacctcagcctcccaaagtgctgggattacaggcatgagccaccgtgcccagccaagaccctcctattttcttaggaaggctcctgtgtcaaccaaaacttgtattaaacgtgtatgttgttcttctgttaatctatttcatgtcattttcatttgcagactcagccagggatcctaaaaaggtagaaataaagttttgccttcctaaatatactatctggtcttttacagaaaaagtttgctgtccactgctctagagaatggaatggctagatccagccagaaaagcatctctgggctttccttagctcatgggcagaagggaggacaagatgtatctgcccttttgctggtggtgtcccttaagaagcaggttcttctggcgcacaatccttttataaccattgctagggtcatcgtgccaaagtaagcctgctgtttttgagtttctaatagaattaattctggatataatctctgaggaacagacgggctggcacaagtccaccctcagaatcatgctcagacacaagcagacaccttatgtcatttaaatgatgttgcagaatcacttgactaatgcaatattgtgatgtctgtactggaaaaacaggatggcatgattcaggaagatgagctctagtgcctggcaaccagcttatctcctccactcttactttccctcaaaaataaggtttctttcttttctctccttatatttcagcttgattgcatgttttgttttgttttgttttgttttgttttgttttgttttgtgatggagtctcaatctgtcccccaggctggggtgcagtggtgtgatctcagctcactgcaacttctgcctcccaggatcaagcgattctcctgcctcagactccagagtagctgggattacaggtgcctgccaatatgcctggctaatttttgtatttttagtagagacagggtttcaccatgttggccaggctggtctcaaactcctgacctcaagtgatctgcctgtctcagccttccaaagtgctgggattacaggcatgagccatcgtgcccggccttgattgcattttttaaaaaatgtgtgtctatcacattaattaaccacacagtcccagtcagaaagttagaacttactgttttcccagtaaatgggaacatgaagccagcctgctttgtgtgtcacacttttgcaagaaaaccggctcagcctaggttctgatctttcctctgtaatcacagagcagagagaagccaaccagctcatggcattttaatctgtgcttttgccccagtggacaccacatagcaatacttctcaaactcaaatgtactggaaatcaccggaggatcttgttacttgtcttgttactgacaggttctattcagtagtttggggactgagcctgatatttggcatttctagcatggtcccaggtgatactgatgatcctagcaccaaggcttgaatagcaacggtctagggcagaaggtagcaaagcatggcctatggccaaagccagccagctgccttttctgtaaataaaattttgtcagaacacagtcactcccattcatctaacgtattgtctgtggctgctttcatgccacaaccacagagttgaatagttatgacagagactacatggcctgccaatcttatactatgtactatctgatcctttacagaagaagtttgcagcattgattctccagggtggtccaaagatagcctgcatcaacatcatttggagattttgttaccaatgtttatttccagtattattggagacctactcctgagacagtctctgcaaggggctgggaagccctacaattttcaagcttctcggatgatgctgatgagccacactttgaggaataaagctgtactctgtttcactgagggaaccgatcactgatggagaggatgttttcctggtattctagtatgtaatgcatttctttcctttttttttttttttgagacagtcttgctctgtcacgcaggctggagtgcagttggtgtgatcatagctcactgcagcctcgaactcctgggttcaagcggtgatgcagttctttttttaattttaatttaattttttttaaagctgctccttgcagagcagggctaccccacaggcagtgtgcccagagtagctgtggtgatacatttctctatatggaacgcatacatgcttacatgcataaacctgggtctctctgaggccctttgagccttgcacacctttctttcctgccattcaaagtctgaatggaacgtgggctattagaatcaatgtggtatcagctgggtctccaggaaatgtatttgcagtaagtttatccgggagtgctcttggattaacgcctgtagaggggaacagaagagcaagaaaggagaaagaaagagaaagggtataggactgggagaagaagataggctgcaatcgtctcaagagagactttagccaatgccatgggaagctctgaagctggcataactctcagacttgtccccaaatagggtgagggagccagacctttgtaaccgctgcctcttccacagctgccctaaagataggacttgcctttggcccggattggctctctttagccaagacaattcctgaagaggactgagagctgagggctgtcttcccatgcagcattcccagcagcttgggaaacaaatccttcctttattccagcagcgtgatctgggaagtgccttacaacctccactccataaggtgtcacttttgttaatactaagttaccatttatcagatgccaagcaataagcttgcttatttcatcctcacagtagccttatgaggttggagttattagcttaattctgaagatgacaaaacagagactcagggaggttaagacgatttcctaaggccccacagcaagcaagggatcaagcggtgattccaaccttggttttctgacttcaaaggttttctgattttccattacaccagcatttcccaatgtgtattcctcagaacagatgttaataggtgttacataaaagagagaacaaagactgtcaaaaggcttttggaaatcttgcgttaaacataaacaagttgtcttacagtagttcttctcagaacccttaacatgctaacacacagcgtgactctgcaagagagatattaatgtgcattacttcccaacctcatttaaaacagaattgctttgttgcagctgatgatgcattgggacatgatgcatggccctgatcagtctccttctgaaggctctttccatgggaaaattgaagatgggataattctcctttaaaatgtgcagtccttaaggagtctgacaactccttgacgctcctccactttctctcttgccaggaaggaaactttcacagggctttcttacataaggaatggaatgtagagtttacactttgttgcctttggtcctgatttagaaataaccagtgcaggatgtcctggttggaggatggggatagagaagcgggttagcctctgagcaagccttgcactatcatgctggtataaggaggcctttccacatccccatccaagctttgccatggccaggtccccatttcccatagctgatgttctggatgggggttgtcagggactccctctgcaccagaggctctggttttagtgctacatcttgaagttgacatgtatactgtatataatttaaaaacttacaatgacaacaaacaatactggcaactttaaatcccctctaaagaaggttggagatgcctccattgggaatattttttagtgttttattttaggttagtttgtctgtaaaataaagatgaaaaatcaatcacaatgcaaagttacttttgctaaaaaccttttctttagcgagaaaatgctgaggacgggcagagggtgggcaggcagatgggagtacagccttctgctctgcggctgggcttattacccaggtctgcgggtcgcctgcaccgcaatttgcctccaggcaaacttccacctgaaatgtagggtaatcgaggcctgcccggaacttgtggaaatcaaaccaagggctcagtttcaacaattctggtagaggattagaatccatgtcaactctgttaccagaaggatggccttgagtgtacgatgtccaggttcttggcgttttgaacaaagaactggacaaaatgcaaagcaaagtaacgaagatgacacaggaacaaagaggcaaaaacaggaatttattaaagcgagaaagcactccacagggtgggggtgggccggagcaagcggctcaagggcctggttacaaagttttctgggttttaagtgtgccttttgaggttcttatccattaccccttatctggatgaaggatttggtccgtggctaattaaaggctgaggtgaattggttctctgtgcagatgaagggattgtccctgcttggcctgaggccaatccaaggcactctccctttacgtctgagacgtggtggaagaaggagggttgtagggagagtaacctttgaccctttgctactggggcttggggagatggggttttaccttttggtttagctttatgaagtttgcattaattagccttagggtccctgcccccagacccaggtgttttccttttgatccacctttgggaagtcagcatggattgaccttagactccctgcccccagacctttgtgttttctcttttagaaagtcagcacaaattggcctcagattccctgcccccaaaccttggtgtttttccttcattcaacacgaattggccttaagttctccatctccagaccctattctcctgcctcttaaccacggaaaggtgctggcctggtcacttgctaatcttaggatggaaagactctttgttgggtatgattttggagactgaacagatttaagcagaattcttgtgcacccccctcaccaatctcacttctgctaacatgtaggtagttgaagatttacagagtgtatttcctactcttggtggaaaatgaaattcaggaagtgaaggttgagacttgaacttagcatgccaatcctgaccatttctggcctgagggatgactcaccctttaaagtttccccaaatgtccccctgctccaaccctgaacgtcctgcctcagatcacaaggggtctcagcacttggttaccagatgaacagactcctagggtggaaggaaggcagggagcagctatgggggatacttttaaagtaagaccatataaaactttagaaggaaagtgatttgcccagccttgagagactttctttaaaaaattcataattgaataaaatagaacagattggttgtgaaaccgattattttgagtgctggttacagcaagtctaagttggaaaagatcttataattttgtgaaactcttaatttcacaagagaagggcccagagaggtaaaaattatgtctcttaggccccacagtcgttaattgtagaggattgaacaaatgtctagatatactcagaccacttgactgcttccccttcctaccatcaaaacaaaatgaactgacccctcaatcaaaaactgagatatattctggtaggaatgacatcattttattattataaaacttcctaaaaggtggagtttcagcaatagcagtaactgcattaatgaatatttaagaagtaataaagggaaggcttgaattgtgtgaaccacgaaagcactaaataatctagaattcaggtaggggtttttgattataagcttgcatcaggtctgtttttggcatttcttggaaatgaagtaattcactgcaggcttgtcaagaattggtcttggggccgggcgcggtggctgatgcctctaatcccagcactttgggaggccgaggcaggtggatcacctgaggtcaggagttcgagatcagcccggccaacatggcaaaacctcatctctactaaaaaatacaaaaattagcaggcgtgatggcgtgcacttgtaattccagctacttgggaggctgaagcagaagaattgcttgaactcagaaggcagaagttgcagtgagccaagattgcaccactggactccagcctgggcaacagaatgagactctgtctcaaaaaaaaaaaaaaaaaaattgctcttgacatggtctcatgttctctgcttgagaaatctccattatataatggaatattttgagtagcaaggcaaagtgactaggaatgacagcttgcttcaactgctgtctgatccagggcaagcttttcagtttcttcatcactgaagtgagaagaatattactgactatctcatagagctgtggagattaaatgagttgctaatataatgtcttaacagccctgcctggcactagtacacactctgtaaagattagctgttattattaccaagaaaggttgcagtacttaaactttcttaagtggtcttttgataaagatccccaggacatggtaagaaaaaggacggttagtctctgtatgtaatggtgatagacagggaaacaacaaccacaagaaaatctcagatcagtgatttctgttggagaccagattattcagtaccgagactggaaagaaggagtgtctctcctatcaggtttggggttaaagtttcaaattgtaattcaattcattaaaacattgccaaatatggctattggacaggtattgtgccaaatacccaggaatgggagacaaggatggtgagcttacacactacagtctagtgacctggaaaattccatgacactggctgaagggaatcactctatttactctcgttattgctgttatttgtaagcttccagagctttatttatttttcttttagttctttaattattctcaaagttcaaacagagttagatccacaggataaaacagcagataaggccatctacagaagggacttacgaggatgtggctagataatattcaatgagtgatgtgttaacattctttccacccatccagttgtcatctgaaaaacaacctcaggtcaggaaattagctcagggtagacatgagaagctaaggtttcttcataggaggtttttgctttgtctggagatcagtattatcactactaattttttcctcctatatgataatttatcacatgtcacacagatgggctcaaaccctggcttcccctaatagtggctatgaggcttgagacaatcagtctctcagtttccatatccttttattttattatagtaaaatatacataacataaaatttatcattttaaccatttttttttcttctttgagatggactcttgctctgtcgcccaggctggagtgcagtggcgcgatctcagctcactgcaagctccgcctcctgggttcacaccattctcctgcctcagcctcccgagtagcagggactacaggtgtccgccaccacgcccggctaatttttttgtatttttagtagagacggggtttcaccgtgttagccaggatggtctcaatctcctgacctcgtgatccgcccgcctcggcctcccaaagtgctgggattacaggcttgagccactgcacccagcccattttaaccatttttaagtgtacggttcagtagcattaagaacattcgcaatgttgtacaaccatcatcactatccatttccagaactggttcatcatcccaagcagaaactctgtgcccattgaatgataacttccattcccctccatgtggcccctggtaatcactactctactttctgtctctataaaacttgcctgttctaggtacctcatgtaagtggaatcatataatatttctccttttgtatatcgttcatttcatttagcataatgtcttaaggttcatccatgttgcagcatgtatcagaatttcattcctttctaagactgaataatctttcattatatatatatatatatatcacattttctttatccgttcatctatcaatggacatttcagttgtttccaccttttggctattatgttcatatctgttaaaggggatgtaatatctatttcacagattgttgtgagggtaagataaccaggaaaaggcctggtatatagtaggtgctcagttaatgctatgtttttttctccctggcataagttatttatttatttatttatttatttatttattttatttatttttgagatggagtcttgctctattgcccaggctggagtgcagtggggcaatctcggctcactgcaagctccgcctcccgggttcacgccattctcctgcctcagcctcccaagtagctgggactacaggtgcccgccaccacgcctgcctaatttttttgtatttttagtagagacagggtttcaccgtgttagccaggatggtctcgatctcctgacctcgtgatccacccgcctcgggctcccaaagtgctgggattacaggcttgagccaccacgcctggccaaaagttcttatatttcctttaaggcccaagtaaaggagtgtgatgaaagggaccggataattcttttcctatttctgtgcctcttttgatttctctgttataacttctctaattaatgcttggctcttcaaattatttacgggaggaagtattccagaggatatggtcgggtgttgggagggggaggtgggggagatgggcaggatgagggtagaagacagaaacagacatccagttagttatatgttgctaagcctaagaatatttgctggctgaaggatctgttaactttttccaaaacggtaatagtgcttactgcagagatagcgatctttgaaacttgaccctccttattgcaaaagccccaagtgttcagatctgggccatcaggactggaaaatgaagatgttttacctcacttcatccttttcttcttctagggcagctacttcatgccaatatgcagtaggatagggcaaaaggttgtgtttttcttctgtaacttaaaggaaataatgtatttcaaaggatcctgagaaagaccatatttattcttgaattcttgtggaatgtaagtggtataagggcttctggggaagccaactgtagtaagtccctctctttagaaagcaaatgtctagacagctggagggacctgtctatccagggtcataaacaagttggtttagagtagggactaaaatcttgatcactttacatctagctaagtatgttcttttgtgccttacagatcaactggtgtaaagctgattttccaaacttcgagttttaagggaaatggataggatactcttttttaaaattatttttattattttatgacagagtcttgctctgacgcccaggctggagtgcagtggcgcaatctaggctcactgcaacctccacctccccagttcaagtgattctcgtgcttcggcctcccaaatagctgggactacagaatcatgctgccacgcccagctcatttttttgtatctttagtagagagggggtttcgccatgttggctaggctggcctggaactcctgacatcaagtgacctgcccgccttggtctcccaaaatgctgggattacaggagtgaggcactgcgcctggcccaggatactcttactaaagggtttctggaagtttcttttgggagcagcactcattgagtaaccgtctactctgtgcaaagcccaatattgagcactatgaaggagaaatgaaagaaacaaaagtcatggaatagggaccctggaaaaaggaaaaatggatacctgaaaatattatgcgggtttatttgggttggggtgatcactgatagatagatgcaatggattgaaggatgatcccccaaaagacacgcccatgtccttatctccagaaactgtgactattattttatgttgtaaaatattgaacatgactttatatgacataagatatgattaagttaaatcttgacagtaggagtttttcctggagtacccagatggaccctaaatgcaatcacaagtatgaagagaggcaggagaagttttgagagagaagaagaggcagcagtatgaccaggtaggttaagatttcagtgatgtgatcacaagccaaggaactcctggaaccaccaaaaggtagaagaggcaagcaatagattttctcctgcagccttcggagggagtacagcccctctgacaccttgatttcatactcctggcttctagaatatgaaagaaaaaaaatttctgttgttttaagacactcattgtgtgctaaattgttacagcagtcaagtgaaaactaacagcatatctaatctttgaccttttacatttcctcgttgctttctctcaaggggtgtggggcaaattccttattcttttctatctagttctgctgccatcagaagcatagaacatggatctcacagtgttgcaagtagatcacttagtctcctttggtttcatttcacagagaacatggtggaggctcagagaagtgaagcgacttgcccacatttacacagttgctgagtgtgagcccagacgtggaacccgggtgcaatacccagatagtactccttgctttctgcttacagcctagagagagggaacttgcagctgagttaggagacagaggctcacaagcacaaggcaatactggcagagcgtagacaacaggtttaggcacccgtgagtctacacagtaacactggagagtccaccaactttacctccaagaagacatctctaatctgcccacttctttccatctcctttgccagcaactctctgcttaaagatccatagtggcttcttttttttttgagacggagtctcgctctgtcaccgaggctgaagtgcagtggcacgatcatggctcactgcaacctccgcctcccgagttcaagcaattctcctgcctcagcctcttgagtagctggaattacaggcatgcgccaccacgcctggctaatttttgtatttttagtagatatggggtttcaccatgttggtcaggctggtctcgaactcctgacctcataatccgctctcctcagcctcccaaagtgctgggattacaggtgtgagccactgtgcccagcccctaatggcttcttatcatccatagactaagaccctaattccagatggtggcataacaggaccctatatgatccaatactcgcaccttctccaacctcattttctaccagtgtctccatccatcaccctccttcagcacctccagctggctgaccttgggttgcccttgaagcaggccaagatctttcttgtctttgtgtctttgcacttgctcttgtctgcctggaatactttccccatggctcttcctgtggctgacttatgttttatcttcaagttccagctcacatagctccccacagaggctttgaagtggctgtttcctccatatgtttcttatcacaggctgaaacagtcttgtttatttgttgagtgtcttctcttgtcactagattaaaaatgctatgaaaattcttgagaaagatacaccctctttgtacctggcacagtgcctgacagtgtaggtacttaataaatatctgttgaatgaatgaatttaccagttttcctaaactgggctacctaaggaatttactatatatttcctgcacaaaagatttaagactctttctttcctcctgaacaatgcatatcaaagtctctgaaaaattctaaagaaaactaaatttagactgtatgcaggggctgatgcctgtaatcctagcattttgggaggccaaggcaggaggaccacttgaggccaggagttcgagaccagtctgggcagcatagtgagaccttgtcgccacaaaaaataaaaagattttaaaaattagacaggcaaggtggtgggtgccctcagcaacttgggaggctgaggagggaggatcacttgagcccaggagtttgaggctgcagtaagctatgattgggccactgtactccagcctgggtgacagcataagactcaatctctacaaaaaaaaaaaaaaaaaaaaaaggaaacacttttaataagcctggcatatttgacccacatatggttttaataagcccaagtgtatttggccatacatcctattgttcaggagtttgtgtaaatgttcctgaatatagatgttccccagaacagttagagaactcttggtgtagaaactggtaacagctgaatccagttaaatcaccagttcatttgaaaatatccagttgactccaggcagcagtatgtgtgtatacacacagtttcgtgtatataaacagcagagtgaagttgctaacagagctggggtagtgatagtgataggggaggaaaactcatagggctggagaggtgggggattatgacctcggccatggatttcaaattctgtctggaggtaacttagagtggagcaagttctcagcttctcaaggggagtttgaccgtgagtctggacaaatcaagagcttgccatgaacagcacacagaaagatccagctctgctgcctccacgtgctctgctcacatagtggccatcctgttccagaaaatgggctttgtcatcacttggctcacatcctgtctctgggtgacctgagagtgacctataaatgtttgactttgctttctaatagaaaaaataatgctgtcagtcgttgctgtatattttgggtactctcctcctctgtaaattgtgtctttccttagacatataattccagtgacaacaaagccattaggtcaacactcactaaataaattttttaaaaacccaacactttgatagagagggaagtaagatgctcagtgatctaagtctccatagggagggctaggaatgggtggctgtgtttggacactcttaccacatccttttctctgaagtacaccacctgggcagttccttagaatgtgagaccacgggctgggtgtggttggctcatgcccataatcccagcacttagggaggctgaggcagaaagatcacttgagcccaggagttcaaggccagcctggacaacataatgacactctatccccaacacacaacaaaatttttaaattagccaggcctggtggtaaacacctgtagtcccaagccacttgcaagactgaggcgggaagatggcttgagcccaggagtttgaggctgcagtgagctatgatcaagccgctgtaccccagcctgggtgacataaataagtaagtaaataaataaataaataaaaagtgaacccatgcagttaggttttgaagcatttaggttactcctgttttctactcttctgccttcctttcacgtttaaaggcctgcaaaccatataaatcatcccataggtttcttggcaagttcagcactgatccaaataaaatataccaggatctttgttctgggaatggcagtaacgatttccaggttgtttttaaaaataatagtgtatttttaaactttttattcaagtataacatatatgccaaaagtgcacatatcattggtgtacatagagtggattcttagaagttgaacacacgctaataactagcactgagaacaagaatcagaacattaccagatcccctggaagcccctactgttccctcccacccctgcaggtaggaatacaccacaatttatttattagttctactattaatgggagattcccaggttttaacagtaaaatagatatttagagtagttgggtcaagactaagtagggcagtgggatagatcttcattgggtgatgtctgaaataacttagtgttttccccttttgaggattagtagcagaactctctgattctctaggaaatatctacctgcatggcagcatgggaatttgcagtctggtctgactccattagttctctgtgcatagaaatgtcaggctggaaggggatcagggcaagttagagccaagcccacttcctcttctctccagcggaagggtcattagcagctgaccaccagtgtcagctgggcagcgatggaactgttgacaaaaccagaagtaactttcctaggaagttggttttaagtaggtgtttggtgtgagtctttggaatattcatatttaaaaagtgggtttagaaagatgtttattaaaaaggaggaaatgttaagagataaatgaagcccccaaataaattatctcagacaaaacaagctttcaaaataagataggaaaaactgagaaaggaaagtgtcctgtagcattttgatgtgcattacaaaagagaaagaaccgctgaggtcagcaatcatcctggctggatttacctcctcactaaaaaataaaaaagctgcagggattaccgttaaaaaactcacaaaacgaatacctgtattgttttgcttttaaaaggatcacacgttattttttaagacctagaaaacatagatcaacagaaagtaaaaatttttaatgttaatttaacaactggggataaccactcattaacattttaatgagtatcctttgagtctatatacatgtatttacacgccttttacattaatgatgatagtatacgtactgctgtgaaacttgctttaaaaaagtgtgttatgggctttctatgcttacaatacatttttagtgaaataaagcaagataaacttgcacaggcaagtttaaaacctctggcttcttatttgaggaaaacataatacagaaggtaaaataatcaaaacaaatttaaaatcttcacgatgcatcataaatattttcccatgccagtgactactgttctacaacatgagatttaatgaccatattttttttcatcgtgaagagataccataatttaatgtattccctatgtgtgggcattaggcaattttgcattattcattactagaacaaacactgcaatggatagtcttagagagaactatctgtgcacattcattattgtttacttagaataaattcctggaagagacattgctcagtcaaaagctatgcccttttcaaagcattttgatactgatttccaaatttccctctggagaggttgtactgatttacagcccaccagcagtgtttatgagtgtttgccaatgctgagtaagtgcaagcatttaaagaaggctttggaaatatgatagggaatacatggtagcttgtggattctttaacccgtgttgtgtatagagtgtaaatcctcatctggtctccgatgcctttcgcaacaggattgccacctatctctctggcctcatttcatctccttctattcctctcccaccacccccacgctgcccccctccccacactgttgttcaaacaggattcatacattcttagctttgtgctttttctccctagatgacactcatattccatccactgtcaccttagccttccgtaatcgcttaaaatctattaatatcatttgagactgggtgcagtggctcatgcctataatctcagcaacttgggaggccaaggtgggaggatcagttgagcccaggagtttgggacctgcttgggcaacatagtgagacctcgtctctacgaaaaatcaaaaaaattagccagtcatggtggagcatgcctgtggtttcagcaactccaggaaggctgaagtgggaggattgcttgaattcgggaggttcgggctgcagtgagctgtgatcatgccactgcactccagcctgggtgacagaaggagagctgtttcaaaaacaaaaacaaacaaacaaacaaacaaaaacaaaaaaaacatgctgggtgcggtggctcacacctgtaatcccagcactttgggaggccgaggcacatggatcatttgaggtcaagagtttgagaccagcctggccaacacggtgaaaccctgtttctactaaaaatacaaaaattagctgagtgtggtaggacgcacctgtaatcccagctacctgggaggctgaggtgggagaaaagcttgaccccaggaggcggaggttgcagtgagccaagaccgcaccattgcactccagcctgggcaacaagtgcaaaactgtctcaaaaaaaaaaaaaaaaaaaaaaaaaaaaaggatcatttgaaactgtttcaaagtccatatccctcatcaggtcttttcttgttcctcccaagcaaagggactcttttgcttcttctcctgtaattgttttatggcagttaattttccctatacaagtcacatccatagttccagaatgagggctacggcccattcttaattgtctcctgtactaggggcaagtcacctttccctgctgtgcctcagttttctcatctgtaaagcacagaagtctgattcagattagatgatttttaagtaccaattcacctttaacaatttatcattccatcttttttcccacagtagacaaacctatccatcaattcttccatatgacttattgcacaaccaggacagtgatccctaaatttcttaaggccacagatgcctttgagaatctgaagaaagccctgagccctaattttccgcaaattaatttagagatatgggcattcaaggacaatgtgattgttaaacagtctgtttaagggcccaagattaagaacttggctgtttaagtctgtgtttgtttgtgtttctcttgaatatagtaggaaggttcaataaatatttttcaatgtgaatcatattcaaacaggaaggtgaatactaaaaaataattatgtgggttttctcttgggacttaattataagtttcattactttcaggtcacccttggtgttaaatctccactcatgtcaacacattaaaaaggcaaattgagaggctttcaaagtacattcaaaataggccatgccctttagtcttttaggcaccattaaacatccagcattttgataaatcctacatagcagttagtgatttcagatttcctgtgtgagaggattgcgaatgggtaagcagttataatgtaatgtttttcctcaaacatgaggacacagatttttgtgagattaattcatggtcataagagtagattgggaaaggataaaaggataaaccaggcagttttcaaataaatctgccttattagaaaatatataaatgggccagttgtggtggctcatgcctgtgatcccagcacttcgggaggctgagacgggcggatcacgaggtcaggagaccaagaccatcctggccaatatggtgaaaccccatccctactaaaaatacaaaaaaaattagctgggcatggtggtgtgcacccgtagtcctagctactcaggaggctgaggcaggataattgcttgaacccaggaggcagaggttgcagtaagctgagatctcactattgcactccagcttgggtgacaagagtgaaactccgtctcaaaaaaaaaaaaaaaaaaagaatagaataaaataaaattgacagctctcgagatctttaaaaaaattttttttatttttattttttgtttttgagacggaattttgctctcgttgtccagactggagtgcaatggtgcgatcttggctcactgcaacctccgcctcccgggttcaagccattctcctgcttcagcctcccgagtagctgggattacaggcgcccacaaccatgcccagctaatttttgtatttttagtagagacgggattcactatattggccaggctggtctcgaactcctggcctcaggcaatccccccacctcagcctcccaaagtgctgggattaaaggcttgagctaccgcgccggccttttgttaattaaaaaaataaaaaaatgttgacatctgtagagatctttatctggctatctcactaaagggaaaaatacttgactatgtcattaatccaaaggatgatgcctgttcttgagattagtggaggtacagaattgggatttgcctgctagctgaacattttcatgcgagtatgtgctctccgcttttagagtgtgtcttttctctattgtttctccttcctactttacattaaagggagatgaatgcaatatatactacttagtttgggggtataaattctgtattgtgaacctggattattgttctctctttagaaccaattatttggtgtagttcagcagtaaaaccaagaataatgacatgatccgctatctggatgttctattactcactttctccaattgttcctacatccaagcaaacaggcccccagtcacaatctgcagcgacagcagtttaattaatattccttctgacaatgctggtgtagctgttggtgacttccacttgcgtggaattaatatgggagtgctgggaagggaagaccctggtctctttaaataataggaaaccggggaagggaagtgcagggtagaggagggcgtggtcccttgttagggatccaccccacggacctaggtgaggacagacatttcctgcccaactgttgcatttcccgacaccaccctggcctgccacgccccatcctgtacctataataaccgttctccacccccaccccccgccccgtaccacacacacatcctagcgggcagccacacatcaaaaggagcacgtcggctgaagaagacacaagcagctggtcgttgagaagagctcgcagaagagcatgcctcctctgcggccgaagagcatgcccgcaggcagtggagtctggccagggcagtctggccagggcagtgggaggacagccgggctgctgagaggcccaactgcaggggaagactacctcccttgtggatcctccgtccgctgagagctacctccacgcaataaaattttacactcattctccaagcccacgtgtgatttgcttcttccagtacaccaaggcaagaaaccccggggtacagaaatccctctgtccttgtgataaggaagagggtctaattgagctggttaattcaagtggtctgtagatggcaaactgagagcaccctgtaacacacgcccactggggcctcaggagctgtcaacattcacccctatacactactaacattcatccctagacactgccatggggtcggagccccacagcctgtccgtgtgtatgcttccctagaggtttgagcagcggggcactgaagatgcgagccccacccccatcacacgccctgagagggggattcccatttcagaataagaagttgactcacaccattgattaattcggttttgaatgttttgtgttgttctaagtcatctctaggtgacctgggcttgagtcatctctccagagagtcattggatcaaattttctgcagctaggtcctagattttttttgttgttgttcaaatttatccttctgaaaatatggcaaaacctatttggtatatgtccaatatgtgtggcatatatgggtcttttatgaatttgaatttaagggacaaaagttggcataactatccttgcctcagggaagttgtccctgaatctcaaggtgagggtaggtctactgttagaaatcctcatactgttcagttctttacaattttagacttactgctatcatatttatatagttgattatgcaattatttgtttactgtcttccttcataaggaactatgtcctttaaaatgatttctctaccccaaaggtttagcaacatgcctagaatagatgctaaaaatgatttcttggctgggcatggtcacaactgtaatcggagcactttgggaggccaaggcaggaggcgcgcttgagcccagaaattcgagaccagctttggcagtatggcaagaccctgtctctacaaaaaataaaataaaaagctaggcatggtggcatgtgcctataatcccagcgactttggaggctaaggcagggggattgtgcctaggggttggtggctgtagtaagctatgatagcaccactgcactcagcctgggcaacagagtgagaccctgtttctcaaataaataaataacataaaaatatttattgaacaaattgttactatgtattattatcactactagtagtagtaacatttgtagaggtctttgcagttttcaaagtcctatatgttgttaactcatcatccatagatcttaaaaacataatgctggccaggcatggtggctcacgcctgtaaccccagcactttgggaggccgaggcaggtggatcacaaggtcaggagttcaagaccagcctggccaagatggtgaaaccctgtctctactaaaactacaaaaattagccaggtgcggtggcaggtgcctgtaatcccagctacttgggaggctgaggcaggagaatcgcttgaatctgggcagcagaggatgcagtgaccctagattgtgccactgcattccagcctgggcgacaagagtgagactctgtctggaaacaaaaaacaaaaaacaaaacaaaaaaaaagaacaacaacaacaaaaaagctataatgctaagtgaaaacaaaacagcacaagcttgatgccatttatgtaatggcataaaataccatttacgtaaatttaaaacatataaataggccgggagcagtggctcacgcctgtaatcccagcactttgggaggccgaggcgggcagatcacgaggtcaggagatcgagaccatcctggctaaaacggtgaaacccatctctactaaaaaatacaaaaaaattagctgggcatggtggtgggtgcctgtagtcccagctactcgggaggctgaggcaggagaatggcgtgaacccaggaggcggagcttccagtgagccgagactgtgccactgcactgcagcctgggtgacagagtgagaccctgtctcaaaaaaacaaaaacaaaaaaaaccataaatacatgaattagcactatgtaggatttaagaatccatgtgtacctaagcacatatagtgaacaagtgagctaaagagaaaatctgggagaaggagatttgtacttgtgtagagaataacttaagaaacataataaaattaagcaggagtgtggccttgcacagactgaaggtaataagatattgggaactgagaagtataattaactctaacctaaagcccaggagaggtagaagggagagatttgtgtacattagactttgggaaaaaatctacaataattatttgcaccatattttgagtgcgttcaattttccaaacacctgattcttgactcaacatcaccttactcccccaaagcattgtcctatttttcttccttctgtcttttctcttgcttatacactctcaaaatatccttgctaaaaagaaatgattatccatgcaacaacatggataaatctcaacacataatactaaatggaaaagccatactcaacaggctatgtactgtacaatcccatttacaggacattctggaaaaggtgaaactatagggacagaaatcagatcagtgattgccagggactgtggtggggaagaggactgattatagagaagcaggagagttgcttgagtccaggagtgccaggctgtagtgagctgtgatcatgccactgcacttcagcctggacaacagagtgaaaccctgtctcaaaaaaacaaaaacaaatacaaaaacaaagaaaaaacataagtaaattatttatgtataaattatactgtatatttaaacacagaaagcaaacacatttctatgaatttccagaaaaacataattcatttttatgatcttcatttctttaatgaggcaaaaaagcaaaaacaaaaaccaaaaaccagaaagtacagactcccaccagtggtggtattgaatgagttaaatgtctccttgaaatcatactgtttttgattctgtaatgtggttagtcaatagaacaattcagggcagagaattcttacggaagaaggctgcaaatgtaggttacattagggatccactgagccactgatctggagtaacaaatgggaaagattgtagatatggtgataggcaaattcatatttttctgggtaacttgttaagaagatagttaaaggtctagcttgaaataattttggacagattttagggcaagcagtttgatgttgtggaaagtgtatggccttggattaaatcttggttttagatggatagacttgggtttgaatattgacttccccacttaatacttaaaagtatgaagttaatataagtattaagttaattaatacttattaatacttaataagaagtatataaagttaatataagcattaagttaattaacctctggctgttcatttcctcatctgaaaaatgggctaataaaagctgccatgtgcagggcatggtggcttatgcctgtaatctcagcactttgggaggccaaggcaggaggatcatttgaggccaggaattcaagaccagccttagcaacgtagcaagacctcatccctacaaaaatttaaaaaattagccaggtggcatgtgcctgtagtcttagtaactcaggaggctgaagtgggaggatcatttgagcctaggaatttgaagttgcagtgagctatgacagaaccactgcactccagcctgggcaacagagtgagattatgtctctaaataaataaataaaaataaataaatacatacaaatttttaaaaatctggcatgcagcgttgtcatgaggatttgaaataaagaactaaagccatactttagttttttaagggactagcacttgttaggtgctcaacaattcataacactttaatatttactgtgggttagaatgcacaatctaaaataggtcaggcccagagacagaatactcaggcctctggggttatgagcctcagatgtggagaggtcctttgaaggccaattactgtgtctgaggaatgatagaagactcctcccaacccccagaaagctggaaaactctctgttaaagaggcctttcccacatgatgataaatttgatatctaagctggggatttatcttcatttacccaagaacatttggcctctgagtcagaaggaaaaggtattttttcttttctaattggagttccacatgatcctccaggctatgtaataatacataactgccccccaccccttatcctcaggggtatgttctaagacttccagtggataccttaaactttatgtagttctgaactcaatatatactattatttttcctatacataatgtctatgataaagcttaatttataaattaggcacagtaagagactaataacaataactaataataaggccggacacggtggctcacacctgtaatcccagcactttgggaggctgaggtgggaagattgcttgagcctaggaattcaaagccagcctgggcaacatagtgagaacccatccctaaaaaaagaaataaaaaaaattgtcagccatggtggcacaagcctgtaactcagttacttggctgaggcaagaggattgctggaccccaggagtttgaggcagcagagttatgactttgccactgcattcctgcctgggtgacaagagcgagaccctgtttctaaataataataatataacaatattctgtaatgaaagttacgtaaatgtggtctcttattatactgtactgagaataagaggggactactgtagtacagttaaagggtagacaaatataataggagaatgttgattagtaagtccgtgggttggtatggtggaaagtgctctgcattcagaaacaggaagcctgggtaatctgtgtttttttttctccccaaagtaggtacttgaggtcactagttgctccttttggggtttcattttctgactataagaaaagaggatgttgaaggccgggcacctgtaatctcagcactttgggaggctaagacagggggatcacttgaggccaggagttcaagactagcctgatcaacatggcaaaacccagactctactaaaaatacaaaaattagcctggtgtggaggcatgttcctgtatcctagctactcgagaggctgaggcatgagaattgcctgaacccaggaggcagaggttgcagtgatctgagatcacgccactgcactccagcctgggtgacaaagcaaggccctgtctcaaaaaaatgaaacaaaacaaaacaaaaaagaggatgttaaatgacttttcaggtcatgtccacctaggatattctactattctatggcttgaaactggagaaggatcttaattaattaattgattgatttatacaaggctcaatatggtattgattccacgtggagccctgtgccatgtgatggacagttaatgaacaagctcgacctaggcctttcctgaattgagcttgtatctattgcagtgctacttgtctagggtcagttcccattcagtgctttcatctggaacatagagggcatgttaattccacttgtaggatgttcagatctggtagtgttgaccaagacattgtatgacagaatcaggttaaaaaacaaaattaaaaaaaaaaaattctagagtttggaaagatgggccaaggctcacaagataaatacataaggtataactcagtacacacagaaggaaagtcttcaactcaggtttaaaaggcacaggataagaaacatagaatggtagctttaagcatctgatctgttcttctgttcaggctctagttatagggattacatagtcacaaagtaacaattatcacagagttgaaaaaggattgggcctccctaagctctctccacctgacagttacacaaatgctattgataaagatgggaaccagttccctaatcttttccactcaatcttttccttcccttttctttcattcgctcctttgagagcaggtgtgccttgtcttaacattgtatccattccagtatctttagtccatagttcttggatttgcaaaccataggcaattgataaaatggaaataatacctgactttatagcagttcacctgaaaataaattgaagcattttaattgatatcagtcgactgtgtgatggagctgccgggaaataccaagatcatctcggactacatgaatagaagtgtacagtgggcagcaagagagctctgtgctctgtgttgggcagacaagttcataaacaatctgctccattctgagtacgacattgaatgagcaatattaaaattggagactgttcaaacaaaatgaacaaattagggacagcacagtaaagtgtaataatatcattttggagtcagacaggcttattcagacccaagttctgacacttactatgtcaccttggggaagttatttaacttctcacagcctcagtttacttgtctatgtaatggaaataataatagtatctatttcatggattatgccaaggactatgatcatgatgagcaattatcatttacatttggaggaattagagtggtttagccagaagatttgaagacttaggagttggggtgtggtgtgtatgggatattatgtctatctttagatatttgaacaattgctgttggaggagttattgtgcttatgttgggtagatgcatatgacagaattaggtcaaatagtgggatatgcagagaagatgacattgcctcaacacatggcataaatttttgacaattagctttgtttaaaaatggaattaagttctttcatcaggtggtgatttccagaccacagtgaatgttcaagcagagactggtttctgtgtcttagaatggtatagaggagagttctgcactggccaagtgagtttgggctattaggggttcccaaacttggctgtgcaggagaaccatctagcagtagagctcagagtctctaataaggtccttagatggttttgatgaagccagtctctgcataggtgatttagatccactggactgcaggatgggtgccctttcacctatattttgttataatgggattccagtagggaagtgctttgagccaggagacaggaagataagaaagtgctggcagggcatggtggctcaccacgcttgtaatctcagcactttgggaggccgaggtgggcggatcacctgaggttgggagtttaagaccagcctgaccaacatggtaaaaccctgtctctactaaaaatgcaaaattagcctggcatggtggcgggcacctgtaatcccagctactagggaggctgaggtaggagaatcgcttgaacctgggaggcagaggttgcagtgagctgagattgcactactgtactccagcctgggcaacaagatcaagactccgtctcaaaaaaaaaaaaaaaaaaaaaaaaagaaagtgccacacatattttggagtcatttggttagaagggaggcttcaagtttgggagcggctggagtctggtttgaatgagaagttagggccagcgtatggagaaatttagatgctacgtgtgggagtttgcaggttaccaagcaggggtccatgataaatgtaggacaaaagaagttacaaataatcacattctgaaaagttgagctaaatgatgaataaggacaagtccagacatcatattcctttcctcttggagttctcaagcacagaacctgtagcttgagttgtcatcttccattttcttcatttcggagctcctcttcatcgcaccctgagtggtgatgatccacaacgttcctgttcctttccaggccgagagagtgggcaggaggaggagctttcattgaagtgattctctcagctgtataggaagcaccccgggtctgctcaacagaaaagccacagttcatggacttggtggtatcggaggtgccaagggctggaagccaaagttcagtttcctcttaagcagcaagttcttttgcgtaagtccaacctgctgacttgctccgtgtaagtgcttttgtttttatctcaaggctattcttaagttaattagttgcaattactagctctgctgcagtggaatgcatagtaacagaagggggaaatgaggccatcagggagatgcagttgagtgttctgagacaacatacagaggaactgcaattcgttacactcaccaattaagtccgaaaaaagaaaaaacaacaacaacaacaataaaaccaaaacttgctccaaatagaaacacaaaggatgaggcaaatatacttacacagtgtttgttataatgtctgcccacatccagaggccacgaaatgtccctaaggatggtttcccatgacagtaagccacagcaggcagaaagagcagtggggcttgttaagagctatagattcaaaagcttctttttattagctgtcagtctaatttctattggggccagtcagttccatcacctataggatgaaaacagagacaccaacctcaaagcgtgttggagccttatataggaagcacttttgaccatattttttttttttttgagacagagtctcgctctgtcacccaggctctagtgcagtggcgtgatctcggctccctgccagctccgcctccaaggttcatgccattctcctgcctcagcctcccaagtagctgggactacaggcgccggccaccatgcccagctaattttttgtatttttagtagagacggggtttcactgtgttagccaggatggtctcgatctcctgacctcgtgatccgcctgccacggcctcccaaagtgcagggattgcaggcgtgagccaccgcactcggccaaccatatttttagtttgataaatgcaggttgagtttgcgattgtctctgctgcaacctggctttcctgctgggccatgtcaggcctctgagcccaagctaagccatcatatcccctgtgacctgcaactgaagaaccacaaaagaagtgaaaataggcagttcctgccttaactgatgacattccactgttgtgatttgttcccgccccaccctaactgatcaattgaccttgtgacactccttctcctggacagtgagtctcgggagctccccactgagcaccttgtgacccccgcccctgcccacaagagaaaaagcccctttgactgtaatttttcactacctacccaaatcctacaaaactgtcccactcctatctccctttgctgactccttttttggactcagtccacctgcacccaggtgattaaaaagctttattgctcacacaaagcctcttcacacggacacgtgtaacatttggtgccaaagacctgggacagaaggactccttcgggagaccggtcccctgtcttcgccctcactccgtgaggagatccacctatgacctcaggtcctcagaccagcccaaggaacatctcactgatttcaaatcgggtaagcagtctcttcattctcttctccagcctctcttgctacccttcaatctcactgtccttccaattccagttcttttttcctctctagtagagacaaaggagacacattttatccgtcaacttaaaaactccgacgtcggtcacggatttgggaagacagccttccgttggtgtctgattatagcggggacgcctgccttgatcattcacccacatttcactggtgtctgatcaccgtggggatgcctgccttggtcattcacccactcaccacattcccttggtggcaagtcaattgctgggatgcctgctttggatgctcacccacattacagcctagggtggctcacccgcccccttctccgtgtctctacctttctctttaaacttacctccttactatgggcaaacttccgccctccattcccccttcttctcccttagcctgtgttcttaaaaacctaaaaccccttcgactaacacctgacctaaaacctaaatgtcttcttttcttctgtaataccgcttggccccaatacaaactgggcaatagttccaagtggccagagaatggcacttttgatttgtccatcctacaagatctagataatgtatgtcgtaaaatgggcaaatggtctgaggtgcctgacgtccaggcattctttacacgtcagtccctccctagtctctgctcccaatgagactcgtcccaaatctttcttctttctctcctgtctgttccttcagtctccaccccaagttctgagtcctttgaatcctccttttctacagacaaatctgacctctcccctcctccccaggctgctcctcaccaggcccaattcttcctcagcctccactcccccaccctataatccttctatcacctcccctccttacacccagtttggcttacagtttcgttccgcgactagctcttccccacttgccccaaaattgcctctgacagaggtggctggagctgaaggcatagtcaaggttaatgctgctttttctttatccaacctctcccaaatcagcatttaggctctttttcatcaaatataaaaagccagcccagttcatgacccatttggcaacaacccttaggtgctttaccaccctagacccagaggggccagaagaccatcttattctcaatatgaattttatcacccagtccactcctgacattagaaaaagctccaaaaattagattccagcttttgaaccccacagcaggacttaattaaccttgcctttaaggtgtacaataatagagaagagacagccaagcaacaatgtatttctgagttgcaattacttgcctccactgtgagaaaaaccccagccacatctccagcacacaagaacttcaaaggccaagtgcagtggctcacgcctgtaatcccagcactttgggaggccgaggtaggcggatcatgaggtcaggagttcgagacaagcctggccaagatggtgaaaccccatctccactaaaaatacaaaaattagccgggcatggtggcacatgcctgtagtcccaagtcccagtttggaaggatgaggcaggagaatcacttgaacctgggaggcagaggttgtgatgaactgagattgtgccattgtactccagcctgggcgactggagtgaaactccatctaaaaaaaaaacaaaaaaaaaccacaacttcaaaacacctaaactgcagcggccaggcgttcctccaggacctcctcccccaggatcttgcttcaagtgccggaaatctggccactggaccaaggaatgccagcagcccaggattcctcctaagccatgtcccatctgtgcaggtccccactggaaatcggactgtccatcttgcccagcagccactcccagagcccctggaactctggcccaagactctctgactgactccttccccaccgatcccaaaggctctctgattgactacttcccagatcttctctgcttagtggctgaagactgacactgcctgatcgccttggaagccccctggaccatcatagatgccgagctttgggtaactcttacagtgggagggtaagtctgtccccttcttaatcgatacagaggctgcccactccacattaccttcttttcaagggcctgtttcccttgcctccacaactattgtggatattgatggccaggcttctaaacctcttaaaactccccaactctggtgccaacttgaacaacatcttttatgtgctcctttttaattatccccacttgcccagctcccttattaggttgagacattttaactaaattatctgcttccctgactactcctggactacagccacaccacattgctgcccttttccccagttcaaagcctattttgcatcctccccttgtgtctccctaccttaatccgcaagtatgggacacctctattccctccttggtgaccgatcatgcaccccttatcatcccattaaaacctaatcactcttaccctgctcaacaccaatatcccatcccacagcaggctttaaaagggttaaagcctgttaccactggcctgttacaacatggcctcttaaagcctacaaattctccttacaactcccccatcctacccgtccagaaactggacaagtcttacaggttggttcaggatcttcaccttattaatcaaatcgtccttcccatccatcctatagtgccaaatccgtacaccctcctatcttcaataccccctcccacaactcactattctgttattgacctcaaagacgtcttctttactatccccttgcatctctcctcccagcctcttttcgcctttacttggactgaccctgacacccaccaatcccaacaactcacctggactgttctgccccaaggcttcagggacaggccacactactttggccaggccctttctcatgatctgctttcttttcgcctgtctgcctcccatcttattcaatattttgatgatcttcttctttgcagcccctcttaccaatcttcccagcaggacactgtcctgcttcttcaacatctctactcaaaggggtactgagtatccccctccaaggcacaaatttcttcccctagcgttacctatctcagtataatcctccatcaacatacacatgcccttcctgcagaccatgttcagttaatctcccagaccccaatccccaccaccaaacagcaactcctttccttcttaggcattgttggatatttcctagtctagataccaggcttttctatcctaaccaaaccactttacaagctcacaaagggtaacttaaatgatcccatagaccctaagtcttttcccaattcttcctttcactctttcgaaaaggccctggagacagttcctacactaggactccttgactcatcccatcctttttccttaccacagctgacatacaaggctgtgctgctggagtcctcacacaggagccaggcccatgacctgctgcctttctgtcaaaagaacttgacctcacagttctgggctggcctctgtgtctgcctgaggcagcagccgcctctttaatacttctagaggccttcaaaatcacaggctatgctccacttaccctctatagttctcacaaccttcaagcattaatatcctcatcgcacctgtcatatttattgtctgcccctcgactcctccagctctattcactttttgttgaaactccaacagtaactattacccatgggcctgatttcaacccagcttctcacttagcacccaacgcaactgaaccacatgactgtatttcactaatacacatagcatcttccccctttcctcatatttctattcttccaattccaaacctagaccacacttggtttatcgatggcagttcttctaaacccaatcaattttcaccagctaaagctggatatgctgtcatgtcccacacctccattatcgaagctgctgcacttcctccctccactacttcccaacaagccaaactgattgctttaactcgtgtgctctctctcgctaaaggaatgcatattaacatttatactgacttcaaatatgctttccacatcctccataaccatgctgccatctgggctgaaagaggcttccttatcacacaaggctcttccagtatcaatgccttcctaataagggccctccttaaggctgctctgctgccggccaaggcaggagtcattcattgtaaaggacaccagaaacctactgatcttattgcaaaagaaaatgcctatgctggccgggcttggtggctcacgcctgtcatcccagcactttgggaggctgaggcgggcggatcacaagcccaggagttcgagaccaacctggccaatatggtgaaaccccgaatctactaaaaatacaaaaattagccaggtgtggtggcggacaactgtcccagctactcgggaggctgaggcaggagaattgcttgaaaccgggaggcggaggttgcagtgagccgagattggccactgtactccagcctgggagacagagcgagactctgtcttaaaaaaaaaaaaaaagaaaagaaaagaaaaaagaaaatgcctctgccgacaggatagcaaaagaaatagccaatgcctccacacccgctaatattccagcccctactccagaaggctagtatttttctttctcctctatcactctcacctactcttcttctgaaaacctgctctaccagtcttttccaactcagggcaagtggttcttagatcatggaaaattcactcttcctgcctcacaagctcagtccattctttcttcccttcatgaccacttccatgtgggataccagcctctggcttgcctcctgcagcccctcatctccttcccttcatggaaattcatccttaagaccatcacctctcaatgctctgtctgccatgccaccagcccccaaggctttctcaggccttgtccttttcctatgcatcaggcttgtggatttactccaacacaaggttggcagattgactttccgtaaatttaaatatctgcttgtttggatcgacacctccaccagatgggtcgacgcctttcccactagctccgaaaaggctactgcggtcatttcttcccttctaacagatataattccctgatttggcccccctacttctattcaatctgacagtggtccggcctttattagtcaaatcacctaagcagtttttcaggctcttggtattcagtggaaccttcctactccttaccgtcctcaatcctcaggaaaggtagaacagactaatggtcttttaaaaacacgcctcaccaaactcagcctccaacttacaaaggattggacagtacttttacctcttgcctttctcaaaattagagcctgtcctcaaggtgctgcagggtacagtccatttgaacttttatatggatgcactttcttgctaggccccaaccttgttccagataaggcgggagaccacccctcatattgtcttatgcccaatttctgcctccaaagaaagaagaagtaaaaactaaaaggcagaaatgaaatccacaagcagacagcccggcgcgtcaccctgggcctggtagtttaaagatcggcccctgacctaatcagttatttgcatgagaagagcactgtgaagatccctgtcctgttctgttctgttctaattaccagtgcatgcagcccccagtcacatatcccctgcttgctcaatcaatcacgaccctctcacgcggacccccttagagttgtaagcccttaaaagggataggaattgctcactcagggagcttggttgttggagacgtgagtcttgccaaagctcctggccaaataaagcccttccttctttaacttggtgtctgaggggttttgtctgcggcttgtcctgctacatttcttggttccctgattgggaagcaaggtgattaacggactgtcgaggcagccctttaggtggcttaggcctgtcctgtggagcatccctgcaggggactacagccagcttgagtgatgcggatcctgagagtgctcccaggtaggcaattgccccagtggaatgcatcctcagagcagcacgtggcaggcccccgtggaggatcaatgcagtggctgaacaccaggaaggaactggcacttggagtccggacatctgtaacttggtaagtctggtctttggaacttgcctactccatttgagtggaagcgtggcctgatcacccacggcatgcccgtatcggcactttggtttttgtttttgacttgacttggattgcttgatactttggttttgcttttgacctggcttggatttcctgatactctgattttggttctgattctggtttggtgtaagctgaaacagtgcgtgtgtgccctttttacccattctttgttttgtggtgtgcgtgtggtgtaagcatggtgttttgtctcaaggaaacatgggtcaggcacaaagtaagcccaccccactaggaactatgttgaaaaatttcgaaaagggatttaagggagactatggagttactatgacacccggaaaacttagaactttgtgtgagatagactggccagcattagagataggttggccatcagaaggaagcctggacaggtcccttgtttcaaaggtatggcacagggtaaactgtaagccagggcacccagatcagttccgtatatagattcttggttacagctagttttggaccccccacagtgtttaagaggacaggcagcagcagtactagtactgcagtcacccccactacttggactgcaccccaaaaacttgtcatccctactatcttctgtctcgtcatactcctattcaccattctcaactactcataaatgccctgcccctgtttacactgccggtttacactttttctccaaaccatcgtagcggatatctcctggtactatccccaatccaccactcttgactccctcttggagaggatagatgatgtttgctgacagggcaccctccaatgctttcaccctgatgaagtcatattatttacttttatactcactcttattctcattcccgttcttatgccaccctctaactctccccatctatcttcaccacactgtcaatctcactcactctctcctagccatttctaatccttctttaacaaacaattgctggctttgcatttctctttcctccaaaatctccaaggccttgacttactcactgctgaagaaagaggactgtgtatatttttaaatgtagagtgttgtttttacctaaatcagtctggcttggtatatgacaacataaaaaactcaaggatagagctcaaaaactcgccaaccaagcaaataattacactgaacccccttgggcactctctaattggatgtcctgggtcctcccaattcttagtcctttaataactgttttcctccctctcttatttggaccttgtgtcttctgtttagtttctcaattcatacaaaaccgcatccagaccatcactaatcattctatatgacaaatgctccttctctaacaaccccacaatatcaccccttaccccaaaatctttcttcagcttaatctctcccactgtaggttcccatgctgcccctaatcccgctcgaagcagccctgagaaacatcacccattatctctccataccaccctcaaaaattttcgccaccccaacatttcaccactattttgttttgtttttcttattaatataagaagacaggaatgtcaggcctctgagcccaagctaagccatcatatcccctgtgacctgcatgtatacatccagatggcctgaagcaagtgaagaatcacaaaagaagtgaaaatggccagttcctgccttaactgatgaaattccaccattgtgatttgttcccgcttcaccctaactgatcaactgactttgtgacattccttctcctggacagtgagtctcagcagctccccaccgagcgccttgtgacccctacccctgcccacaagaggaaaaaccccctttaactgtaattttccactacctacccaaatcctataaaactgccccaccccatctccctttgctgactccttttttggactcagcacccaggtgattaaaaagctttattgctcacataaagcctgtttggtggtctctttacacggacacgcataataggccaatacagatttgcctggctctgcctttgtgccttcatgaagatggtcactattttttttttttgtttgtttagacagagtctcgctctgtcacccaggtggagtgcagtggcatgaaatcggctcactgcaacctccacctcccgggttcaaataattctcccacctcagcctcctgactaggtgactgcaggcacatgccaccacacctggctaatttttggtatttttaatagagacggggcttcaccatgttggccaggctggtcttgaactcctgaccttaagtgatccacccatctccgcctcccaaagtgctgggattacaggtgtgagccaccatgcccggccaagatgatcactattttttaggattgtctctgctactgcagtgccattcccaggcaaacatatctaaatttgcacattttcagggaggcattctaataataatctctttaacagtttgggagttgctttagttccctagggctgccacaacaaagtaccaaaaaatgggacctcatgcggtagctcacctgtagttctagctacttgggaggctgagacaggaggattgcttgagcccagagggttgaggctgcagtgagctatgattataccattgcactccagcttgggcgatggagctagactctgtcaaagagaaaaaacaaacgaacaaacaaaaaataggtggcttcaaacaacagaaatgtattgtttcatagttatggaggctagaaatctgaaatgaaggtaatggcagagtcatgctttctgatagctctatgggaagagaatctttccttgccttctctggcttccagtgtttacattcaattcttgagttccctggcttagagatgcatcattccagacacatggctgtcttctccctgcatgccttagactgtcttctacatgtgtctgtctctgtgcactaatttccccctttttataattaggcaggtcatattagattagggcccgctctaatgaccctattttaacttgattacctctgtagagatcctatttctggatgaggccccattctgtgtactggggattaggacctcaacatatctttttagggagacacaattcaacccataacaggagtcacacagatctgggttcaaatcttggccctaccatttattagatatgatcttggtcaagttattcacctttctgagcctcagtttctccacttttaaacttggcatgatattattaattacctcatagggttgctatgaggataaaaagggataatgttttccaagggcctggcaagtgaagaagaggggcattttcacgaacctattactttttttttttttttaagagagagaaaagctcttcccagaagacttttggagaaatgggacatattcccatgtcctagttaccaaggaagctgggaaagtgaatatttgacatttccagcctaaacaaagggagataaggctctgccagcatgggcaacatggtgagatcctgtctctacaaaaaaatacaaaaattagctgggtatgatggtatgcacctgtagggaggctgaggtgagagaaccacttgaatctcagaggttgaggttgcagtgagccgagactgcaccattgcattccagcctgggagacaaagtgagactttgtccctcctccccccacccaaaaaaaaagtacctgttgttacgttgtggggaggttattcctttttttttttttcagacaaggtctcactctgttgcccaggctggagttcagtggtgtgatcttggctcacggtagccttgacttcccaggctcaagtgatcctcctgcctcagcctcccgagtagctgggactacaggtgccacaatatccagctaattttcatatttttagtagagacaggatcttgccttgttgcccaggctgatctcgaactcctgggctcaagtgatctgcccgccttgacttcctagagagctgggaatgcaggagtgagccaccacacctggcctattccttagattttatttagtcttagatctccaaccatctggtaggatttaggaataatagtagtcaaactcaagaggatagaaactgtcatttacaaacatggttcttgacatggaatccttccttcaaacagaagcttacaaggaagcctaacatataaaacacatttcagcagccctgttctggttgaaatggggttggttgggaaaactcaggcatattgcacttaccttgtttctttgcagtgtctcttaagacacctttgtggagctcctcagacaccttgagagttaaaaaaaaacactgggttaaatgttcattggtgaagatgctatttatacctagatctgtcatattggtgtttaattttgaatctgggaaaggagaatgcaacccctttgcagcagcagggatcccaaagtcctgtagacccatgggaaggctgttttcctgtggtttcttgtgagctccatagtgctctatctttctgatggagagggctgtctgcattctcaataggatagcgtcacccacaagtttctcccaggcattgagtcagctgcagatcctgacaatgacttccaaggacagaggatttctcagccttttggtgtatgcaaagtgtctagctcttactcccataggattcagtattgctacaatgacctcaaagtataggaatggaatgtatcctccatagcattgcttaggaccacaggcaggtgtcaggattcttgtaacatctgaatatgtatttaaatctggttgtgcagccccgtgtggtggctcacgcctatcatcctagcactttgggaggctgaggcaggcagattacctgaggtcaggattttgagaccagcctggccaatatggagaaaccctgtctctactaaaaatacaaaaagtaggtgggtgtggtggtacatgcctgtaatcccagctactcgggaggctgaggcaggagaattgcttgaaccagtaggcagaggttgcagtgagctgagattgcaccattgcgctccagcctgggcaacagagtgagactccatctcaaaaaataaaaaaataaaaaataaacaaataaatctggttgtgtgctaatacagcccagtggctgagactcaggttttgcatctgttgtgatgattttgaacccagctttgcctctttcttattgtacaagcttgaccaaattacttctcaaccttagttttattatatataaagtaaggacaacaatattttcatcttagagccgttgtgagtattgaggtgatatgagcaaaaacacttttccttgtgtatattctcagtaagaacccctgtcgctgctgttgcagaagacagatgtgccttcaacactggagaacacttttacttcctagctgggacactgtcacaatttttgctgtgaacattacttttgaccacttgaccttttcttcagaaacatcatctttgctgcaaaaagcctccccctactcccccactccctctgtgtagcagggaaaggctcttaggatgtcctatagtaaccttgccgccacttccagttcagcaccaggagcagaggtagaacagaaagaagttggttgggatgtcaagcatacctagatagcctgttattttggcacaggcatgggtgaaagggctgagaagtacatagtgagctggacaggaaaggcagaggcagaaaaaatggagcgttctaaaaaaaaaaaaaaaagcaatgacctcttgattacctaaagccccaggcctgaatattaaatgctaaatgtttggaagcacaaagacaatttgagtttctctaaaatcaaacctgggtgtgatcattgtactacagttatgatggagttgaatgcttaagtgtctaaggatgaaaacctctctcaaacttctggtttcaatctccaggctgctaaagagactctagataatgagatccaagcatccatattctaaacaagctctccaggtgattctgttcagccactcactggttgattttttggggggatgcattgacttactccaaacccacatccctgggatacatgctctttcaatgtagtgcggaagtgcaggatttcttttgatgtctaataataatgatcatatgggcagaatttcatagaagttgaaggaagtctggtttgggatcaggaaacctcaagtttaataataattttctttcagtttccccataggagcttggcctaatcctgtagctgctgtctctcagagacaatggttgctctttgcattgcctcatgatcatcacagggtctgtacaacagcaggggcaaccatgattatctcttctatgcagtgtgacaaaatttcttgttatcttagatttttctatgtttctcaatttttctaggcatattataaactgtcatactttacttatcttgaatttagctgtcttacagtcatagtaaaaaactagaagggaaaaatacatttatgtgcacacacacatacatatatacattctctttattctctctctctgtctctttctgtctctgtctccctgtctctgtctctctctctctctccctctctctctctttatctctctctctcacacacacacacccttttaattaaacagccagaccagatggcactaagacttaagatactttacatgtaggcaatcctcttagactcatactcagagcttatttactcttattttatgcctaattctaacagaacttcttatgtaacttccaagcttcaagtagaataggttcagcaaacagacagaacaaaagtgggcaaaataggtagacatactgaaagcaccaaaatctgagagctaaatgcccaataaccaggcagaagaaaaataaaaaattatatataccaagtagagagaattttggagtcactaaatttaagagtaaataatcctctgtgcctccatggatcctggcaatgctgtgatattgcacggtacaatccctcctgttttcgatcatgacaaatctgaatcatcaagaaggctagattaagttctgtattttatgtttaggaagcacgggtataagtgttctagctaagaaaaatttatatctaaaatgtttaaacttccagacaagatttggcttctgggaatcatagagttttaaagttggaaagcatcataattattattattattttgagacagggtctcactctgttgcccaggctggagtgcagtggtgcaatcttggctcactgcagcctcaacctcctgggcttatgtgagtctcccacttcagcctcccaactagctgagactacaggcttatgccactatgcccagctaattttgtttattttttttgtagaaatgaggttccactatgttgcccaggcttgtttcaaacctgtagactcaagcgattctcctgcatcgacctcccaaagtgctgggattacaggcatgtgtcaccgtgtccagccaagcatcatgattttaataaaactttaatttatgaagtggtataggacaataaccctctccattgagctgaccaaccaggtgtgaccttctgttacccatcaattgaagttggtgagctagacagatgaagactttttgccatcctagtattagacgaatcctaagaccctttctaaaattgcagagaaagaagttagaggtaaaggaaagaactcgttggttgccacacatagcatgtgtccatacttttttcctacttcttaggcccttcaattatcttatactcccaccgcatccacaacatcctccccacctttcatctgccctaccctgcctatctcatgagtccaaatctattcctattctttagcctagcttcagtgccaccttgtccaagaagttgtctggaacctgcaactgaaactcatctctccttctccaggcttccacaggctgttaccaagcactctcattgtacttttcaattcaaatcttatagatttttcctttttaattatggtttcttcctcttaatagcctatagtttgcttgaggacagaatctggattgattcatttctgtgtcttcaatagcacctggcatagtctttcacatttagtgggcgttttataagtgtttgttgaatggataacaaagagacagcctgcatatttgtcattattacattgataactacctttatcctttgcatttgtcattgttacattgctgacatagagaattagagactacagggaaaacatgtacttactgatagaggcattcatatggaaaattagtgctcttactctttttcccttagaagaataacaactttcccttttcttaaaatgtgagacctgagagtaaaggcatctgtcaaataaagtcattgaacattgtaatgcagcattacacttacgactatagcttcaaggtacatttgtttgacactctggttcattgggtcttaacaaaagtagtctaataacatatttgtgtaacatacagagatttcaaaatgtgcacaaactcttggctgtcaaatggcaggccaaatggatgctattatccttgctttttagatgaagattctgaggctcattgaactaatgtgagttcctcaagtttacataggaagcagcagaaccagggggattttttgtcagctctgtctagcgtgaaaaccagcagaacattcagaaattacaaattcaaatgtttcttgttgggtttggcctgagtgctctctcccacatatgaacactcacagtaagcattgattctaccactttttgcattttctaccctgagatgctattgttattttaaaatatggagacagtgtaatagtttattttatgcatcaacttagctaggccacagtacccagatatttggtcaaacaccagtctagatgttgctaggaaggtacttttgaaaagagattaacatttaaatcagtagaacagtaaagcagatgaccctccatcatgtgggtgggcctcctctagtcagtcgaaaagcttaagagacgaggactgaggtccagactgccttcggacttgagctgcaacagtaactctcctctgggtttctagtctgcctgcctgccctacatatttcagaaatgccagcccccaaaactgtgtgaactaatttctttttttgagatggagtcttgctctgtacagtggcacaatcttggctcactgcaacctctgcctctggattccagtgattctcaagcctcagcctcctgaatagctgggatgatgtgtgtgtacccgctaatttttgtattttgagtagagatgggtttcaccacattggccaggctggttggtcttaaactcctaacctcaagtgatctgcctgccttggcctcccaaagtgctggaattacaggcatgagccaccgtgcttggcctgtgtcaactaatttcttaaaataaatctctctctttttctttctctctctctctacacattctattagctttgtttctccagggaaccctgactaatatagactgctcctaatttatgaggataatttattttataaatgtatttaagcttagcatataagaacccatgaatttataatgatacaaaattttttaaacagaaaaaaatcaccatagcaaaaaacaaacaacaaaaaaaactcaaaaaaattaataaattggacactacttgaagtaactaaggtttcaacttcccgttctgaaaattgaccattaaaaggaaagagttaagcactgattctgtatacattgcactgcaggataaccaagccctaactgagaagggaaagttctttacaaaaaaattctagccaataaatatggaaggactgatagagctagagctgttttctaacatcgaatgtaataattgattcaagcaattatcaacaaggaatgaaaccgtgagatgaaaggtagacgaagaactttacaatggcttgatcatgcttatattcccagaattcactcatcaatttgagtaccactaaaagtgggacaatcacacattataaacctcccagtacaaggatatttgcagcaaacagaaccatctgggaagaattcttatcaaaaaagatgaggctgcatcaggcctttcgctaatgtcaatgtataggaaatatggcagatagaacaaattaaagcagacagtaaaacaaaaagacaaactcccaatgggtaggcaactaagagtagaggagtgttactcataattgtactgggacaaaaggtataaactggggctgtctcatgcaaaacttgaggcgtggtcactgtaagcatgtggtacattctaaaagatgactgacctggcttctgcaagaagtcaatggcatgaggcaaaggcaagaaagcttgttctagattaaaggagagttaagaaatattaggaccaaatgtgatgatggaccaggtttggattctgatttcaactattagggaaatatgctgccattgactgggtttagctgataccaagaaatccttatgtcacagatactgtaagaaaattgaggtaatgtgagaaactatccatattttttagagatgcataatgaaatacagaggggtaaaatgacatgatatatatgattttctttaaaatattttattaaaggatagattaggctaatatggcaaaatcttgataattactggtgataattttatggagactgtctaccattttctctatgtcttagtatatctgaaaatattcataatcaaaataaaaatctaaatctgaaaagaaacattttctctcttttgttttgagacaaggttttcttgctctgttgctcaggctggagtgcagtggtacgatcatagcttactgcagcctcaaccttccagactcaagcagtcccacctcagcctcctaagtagctgggaccacaggtgtgttccaccataccctgctgattttttttttttttcctgtacagatgaagtctccctatgttgccctggctggagttgaactcctgggtttaattgttccccccacctcggcctctcaaaatgctgggattacaggcgtgagccactgtgtccagcagaaaaaagcatttcttaaaaaccaacatggtctatggttgttgggtctaagaacacaactatttgcctatttatagtttatagaataatgttaatatctaatatacattgtgcttgctaatgaagttctaagtactttgtatgttatagttaatttaattccataagccctggaaggcaggtatctactgttatcattcccatcttacgtatgaggaaacggaggcactgagaaattagctacccaaggttatatgtcaagtgagtttaaagctagagtttgaactaggcagtatatcactagcatccatatatattcttatccattctactactttatgcttaatgttaatttccaagagtagagtagtattaattcttatgtgacataaaacagtgaattgagatgaagaaaagaaagaaagagctttcttttttttttttcctttattctttttttttttttgagacggagtcttgctctgttgcgcaggctggagtgcaatggcgtgatctccgctcaatgcaacctcgcctcccgggttcaagtgattctcctgcctcagcctcccaagtagctggagctacaggcccatgccaccatacacagctaatttttttttgtatttttattagagacagggtttcaccatgttggccaggatggtctcgatctcttgacctcgtgatccacacacctctgcctcccagagtgctaggattacaggcgtgagctatggctccccgcccagtaagagctttcttttatggggaatcttagacaaaatttcagaacagatgaggtttaccttggcatgttcctctctctatctctgggtgctcctacctccatctgcatctctcctcatgaccccaaatgtctagtaactttaggcctttctaattcctctgatcagaactggctgacgatgaatgaagctccacatgcccatttcactagattctaggtagtgtgggtctgggttggggccttggatgttgcatttctaataagcactcaggtgattttgatgtaacttgtcacacttttagaaacagggctggtgtttcactacccataagcgtgcatcgtgccctaccttatattctatccaaagtgaactactgttctccattctaagaatttcatctccaagtcaaatttcaattccctattccttactttaacatgaaaggaaagaaatggaatcagacaaatgaattcacactaaaatgagaataactaatatcagctccctcaaaattcccagaattgtttgcattttcctaaaaagaagataatttgcaaccaatttaaagatcaattgatggatgaatgaactcattcatttaattatttgacaaatgtgtgttgagcgcagaccatgtgctgggcactgagaatacaaaggagaataaggcatggcctctggctgcgagttgcttatgctagagttgggaagagagaccaggaacaaacgattctaacataatggaaacgtgtccctatggaacagaaaaccaaacaccgcatgttctcactcataggtgggaattgaacaatgagaacacttggaccacagggcggggaacatcacaccctggggcctgtcatggggtggggggtagggggagggatagcattaggagaaatacctaatgtaaatgacgaattaatgggtgcagcaaaacaacatgtcacatgtatacctatgtaataaacctgcacgttgtgcacatgtaccctataacttagagtatcataaaaaataaataaataaaaaagtgtccctgtggagtttaggacagggttctatggggtcacagaacagggtttcctaatccagagtggtggggaaggcaagggatcaggaaagactgcactgagaaggaggcacatcggctgatctctgaagttgccagcaaaaattccagaggctaaaaaaggggagggtttatgtaagaaacagaatactcaagaaacaccagaacggagtgagatgggggaggatagcaacaaatgaagcttgaatatatgggtgggggcctttgtaggaactgagggatgcctgggtcagtccttgtgagtaaatgggaagttcagctcacttggggcttttccttctcttccctccagcagtatcacccttggggagcccagaaaaacatcacagaaaggagagagtggcttaagtaaaattccagttcctttcttccttgagaaattaggagatgcaaggctgagaccccttgcagctgactacttggaggagtgccgacagcctttgctgtttcgtggcaaatggctaaaaggagcctacacggagtggggattccagaccagcctcaaacaaggctgctagctgagtctgatgggaagctgctggaaacttctgaaaaccccagtaagaggcgaggtgagtagcctgtctttgtctccccttgatccttggaagttgaaccttcaattcttggaaaattaaacctttttcaggttggctgagggcaatgacatggcccagttttccttactatttacttctttggccttcagccaacatctcaaagtcagtctcctgagtcaggccaggacagtagtcccatgtctgctgattctgcagtagagactggaaaaatgtgcccacttggtccctgcaggctggaagcacttgcatctgctcaggctccagcagaggcatcccgactgcagtctgttagcgtggaggctgcattacgaaattctctcccaaagtccctttgcctttctttcaaacacttacacaactaatagagattcattgtagaaaaattggaaattatacccaagcataaagaagaacatttttacaatttcccagggtttaatactgtgcatgcaattttaggatgtgtgcttctagcatacatatgtacattatactttttgtagccacgggatcatattgtacatgctgttcagaagtttgcttttctcatttactattatgtgattattagcctattacaatatcagtatatttgttgctgcaatgaggacatactattccattgtaaagatgcaccatatgttattaaactattttcatttttgaacatttagcttgtcaccaatgtttttttctttattcatctttgtatacacttcttatagacttactcaactttttccatagaggacatttttgcaagtggacctgctgggtcaaatgtcttcaaattttaaaggctttacacatatatatctgatcaaacggccctataacttgtatgaatgcgtacacctggtagcagtataagagtactcattttccatcatcatcatcatcatcatcatcatcatcattgctaatatttaatgagcacttagtatgggtctggcaaatatccaagcattttattcagaacaattcatttaattgtcacaactctgcggtagataccatggttattcaacatgtacaatagggaaactgcagtacataattatatttagaaaacagaaatgtaaggccgggcacaatgactcacgcctgtaatcccagcacgttgggagtccgaggcaggcaaatcacctgaggtcaggagttcaagacaagcctggccaatgtagtgaaaccttgtctctactaaaaatacaaaaattagctaagcgtggtggtgcatgcctgtaatcccagttacttgggaggctgaggcaggagaatcgcttgaacctgggaggtggaggttgcagtgagccgagatcactccactgcactcttgcctggacagaacaaaaccctgtctccaaaaacaaaacaaaacaaaacaaaaagagaaatgtgtaagaaaaaaggaaaaaaggaagaaaaataatttctccatcttcaaaccgcattatctgtgaagcagccacttataaaagttttgtatttgtctgaatgttttctatgcatataaaaacataaagtgtgtgaatgtactcttttgcttttaaactacaaaagagatcataccacatagaccatcacactcctctgcaatccggatttttcttctaacaatatgtcatggccatcttcccatggcagttcatgcagattacctcatttgcaggtgcacggcattccactgtatgaatataccatattggttcatgtgtctccctcatcttcccaaccaggctgtaaattttgcacatctatagcataatcctatggctcttatcaaaagtctgagctcatatcaagtgaacactgaatggaaaaagttattattgctcggtttttttttgtttttttttacagaatctcgctctgtcgccccggctggagtgcagtggcacaatctcggctcactgcaacctctgcctcctgggttcatgccattctcctgcctcagcctcctgagtggctgtgactataggcgcctgccactgcgcctggcaatattttttttttttgtattttttgtagagacagggtttcaccatgttagccaggatgggcttgatctcctgacctcgtaatctgcctgccttgacctcccaaagtgctcggattatagacaggagccaccgcgcctggccatcgatgcgtatttttgcgggagtcataacacctttgaagtttaccagttagttgcatcatcaaaagcatctaaagtagggtggaaaaatcactagaagggcacttggggtcctgggttctggcactgattctgccaggtggtatcctgagcagggcgcttttcctgtctgcttctttttgctgttacattagtggtttggactgacagccatgggggctttttctagctttgacatctcatgaatttataagccagagcaaaacccacttttgtgagccatacggtaagaatgggcctgacagctcatgttctaaagaataattttaactcttggtttgtacacttgacattttttgagatagaaaaataaagaaaggagagcatatgatatggtctcagagtgagagtgagaagtgagccaaatctgccgtatggtctcccagaaacagtgcaggggaaaatcagtccatgctatttgttctttcctacttcaagcactttccaaacagatttgcaactgagattcgaaatgctgtgttatgaggacccaggaatactcgaagtagggtcatatgtaaatttacttattttatttataaagtgagaaaaaggtgtcaacttgtacatacactatgatcataagtatgtaaaatatatacttagaacagcagaaaatacaacaaaatgatatagtataatgtgggtaatgggattatgggtgatttccattttttttttttctctacactttgctgtattttctcaaagtttcccaagtgaataggcattacttttagaatcagaaaaatacaatcaggctgggtgctgtggctcccacctgtaatctcagcactttgggagcctgagacaggaggatctcttgagcccaggagtttaagaccagcctgggcaacatagtaagaccgcatctctacaaaacattagcctgatgtggtggtgctgtagtttcagctactcgggagaccgaagtgggaggattacttgagcctgggaggttgaggctgcagtgagccatgattgcaccattgcactttcgcttaggtgacagagcaagactctgtctcctcaccaaaaaaaaaaaaaaaaaaaaaagggcggtcagaaaaaaaatcttcaaatattaattaaaaaaagaaaataatcacacaaatgctactagaggtcactttgaggagttaatatcatcattatcttctctttcttttccttcgctccattttttaagtttgccttaacaaatgtgtattaattttagaaagagaaacaaccccactagggcagctgctgctccaaattcattctctccctctttctttttactggaaccctgattttgttggaaatggcaatgtaactaacaaaaatctatacctttcagtcttccttgtagatagaagtaaacatttaattaagttctagctaatgaaatataagcatacattgctggttgggcctctcagctaactaaatgggcttgtgcctgtttgcctattccctctttctcccctcctggcctcaaactcagacgtaaagtttggaactgcagtggccagcctttaatgagaagacaacctcaaagatgaagtaaagctgatagaacagaaataaaggtgcctgcaatattagtggcatgttggagccactgcatctggctcagccacttttcttcaacatcagagtgaaagaaagagagcaaactaggcggggcggggtggctcacacctgtattcccagcacttccggaggccgaggtgggggaatcacgaggtcagtagatcgagaccatcctggttaacacagtgaaacctcatctctactaaaaacacaaaaaattagctgggcgtggtggcaggcacctgtagtcccagctactcgggaggctgaggcaggagaatggcgtgaaccagggaggcagagcttgcagtgagctgagatgctgtcactgcactccagcctgggcaacagagtgagaaaccatctcaaaaaaaaaaagaaaaaattaaaataaagagagcaaactcctcttgatattgatatttcttttttcttttcttttctttctttctttttttttttttttttttgagacagagtcttattctgtcaccaggctggattgcaatggcgcgaccttggctcactgcaacctctgcctaccaggttcaagcaattcccctgcctcagcctcctgagtagctgggactacaggcttgcgccaccaagcctggctaattttttataatattttagtagagatggggtttcaccatgttggccaggatggtcacgatctcttgacctcatacgttctttctcgtgatctgccctcctcagcctcccgaagtgctgggattacaggcatgagccactgcgcccggcttccccttgatatttcaatcactgtagctgttagtcatagctgagcacaatttctaacaaatacacccacttaaaaaaaaaaaaagaaaaacacacacacatcaattgctaactattgcgaacatcttataaaaaggttttaggggcaatgcaattgaaattcacttaaaattaaggaaataaaaggcaatgttctactaaaaattaaggatggtccctgaagatccaacacatctaatatgtttcacattgttaaagttccatgcacggtggcaaattcattattttttacatttggggacaataagtttgttaatacacgccagcaactaggaagtcaatgcatcaccatatgcctgaactgagaacatttgtcacggtttacgttctttctaaagagtgcagaacagaccttgacttgtagaatcaccaacgcggggacagttacttgaaatgtcagatggaaaacatgttagcaaatggggtgtgtgcatgcattctgtgaaaggaaaggcctcagccccctgttaagcttcctgctgcagctccctgatcaacaacaatgctgtagccacgggcagtttttcaggacaaatcctcctgtcactagtttcctcattcagggaggtcaggttggaaatgagaggaaagatcagaaacaaagaaagaggcagggtcaaacatgccatagccaaaaggtccttggcatgttgttaattaactccactcctacttttgtgtagctgagtaagtgaagctagtgcctcctaggaagttagtggctgggctaagaattagaaccccataaccccaggctgctgctccaaggtgtagtctgtagaatcaggaatatggatgagaaccaagcacagggtcaactgaagcagaggtgttggtaatatcaagtcaagggtcgcacctattttcctgatagttcagtaaaggcacctccgctgaggaaaagaagtttgggctggatgtggtggctcaagcctgtaatcctagcactttgggaagccaaggcaggaagattgcttgagtccaggagtttgacgccagcctgggcaacgtggtgaaaccccatctctacaaaaaatacaaaaattagccgggtgtgatggagcacacctgtagccccagctacttaggaggctgaggtgggaggatcccttgagcctgggaagtcaaggctccagtgacccgagatcgcgccactgcactccagcatgggcagcagagctctctctctctcaaaaaaaaaaaaaaaaaaaaaaaaaagcagcagcagcttgggtaatttggagccaaagtgggcagagagacagaaggactaatctgttgaatcactttctcaaccctcaccttccctgtgcttgtggaattaagtgtgaatcctggctttctctccgtggcctcattcatcacaagactacctgctgcactttcccagccctctatgcctggggacatcaaaacagcccaacttattctctcctgtgtctaggaacagtttgtttccataggatagtattcttatgctacaatggatgtaaaaatcctctctcctttttcccatgagaaacaaagtcatctccaaaggatggagaattcctgatatgttcatttgtttattgggtgctgcggggaggtgaaatagatgtacgagacacgcactccttttttgaggtgcttaagatccagccaggaaaaagaacacaggggaaaggactaggatttacaaactaacagaagaactttcctttgtgtattaaaaaactcaccaaggaactctgcaaagcatccttagcaatacaaaaaccaaatttgaaatgtactgttttttaattttttaaaaaaacttcctggatcaagttcttggcaaagttcccatccctaccaatctagaccaaaacctggggttagatgggggaagattggaggtggattatgcccattacacatagacaaactccaaggtgatatggtggagtggtgcagagccggtcttcaaagtgaggggtacaagaagattcaaataatgtacatataatttataagaatatgcgtatgtgtatatgtaatatgtaagtatatacaaatgtatacttttgtatattttgtttgaacacacacacacatacacactcacacgagtgctaaaattataagtatataagtatatacaaatataagtatagataagtgtatacacatgtatacttttgtatattttgtttgaacacacacacacaggcacacacgcacacacacaagtactaaaattatcttcactgacaggaatgcacgataaaaggcatttgaaagccactggtttagagaacgagcttcagagttccagttgcctaaaatatataaagttgggaagatgacattacctctcagggttacagtgaaaattcaggcaatgtatgcaaagcgcttggtatagtctttttctgccacttgctaagctttccaaagacagaactcatgtctgttgtgtgcattgattgtatccttcaggccaggcatagcatctgcacaaagtaggtgctttacaaatatttgtcaaatagataagtggtctgtaggtatatccaattctttgcatgtttaccggacctccacctgtatctgtgctatacaagcaacaaaattggagtacacagaactgagaataacattatgatggaaatgaccttcaactcaccctctgtatattaataggtaaatcattcacaaacttgggtaatttattattagaaacaaactatttacaacacacctgatggctgatggtgattcaccagcatgctacaaacccatggattggaaccactgctataaccataacttattacactttgtgatctaatctgtttggattcgttcatgagacacacttataaaaatctctgtataaacagtgcttatttataaaaccaataatagactgggcgtggtggctcatgcctgtaatcccagcactttgggtggcctaggtaaggatcggttgaggacaggagtttgagacaagcctgggcaacatagtgagaaccctgtctctataaatttttttttttttttttacaaaggaaattatgagggggtagtggcaagcacccaagtagtcccagctacttgggagggtcacttgaccccagaagttcaaggctgctgtgaattatgattgtaccactgctttccagcctgggctgtaagagcaagaccctgtctcaaatttttgtttttgaaaaagaccaataatgggtaaaaaagagaaaatgaatataaagtctaagagcagaagagatgtagattaaatacagagaaatattcttgatcgtgagagttgtcaaatccagtcttgctgccatttaagaaatcaattattcccctttggcccctggatcttctggttttccttctgatcatgtgtataatgactgctgcgtatacatttttgtctccaaaattctataatcatttttctccctccccgagtggcaaacaacttttcacagatacatttccttataagaatgtctttatcaattctgacaaacaatccagattccaaattccactgccacgtttccgctgagccactcttgggcaaaccctcccttggagcggcacacttttctctccctgggtcttcctgattcctccaagccaagtccttttcttcctagtgtctcctgagctttgtattgtacgcctgtcaacttcaaattgcagttgaggccaccaggctggcaatgcgtcaagcagagaaccagcagatcccagcatatggctggtgtttaattaaataatggctgagtacagagaagccttgagaaaaaaaaaatatgcgcagacaacttcctactatcttgggaggatgtgaaatagctaaaatctttctcaatcctggtgttacaaaacccttatctggaacactggcagcccaagaaagtcaaagtcgaaataactgtacaacagaggtagataataagtgatctcatactttctgtatctcaatcactagtgtcttcagggaagatgacgtaatgagaaagagactgttcttgctcctcttgggcaatacttgtctgtgtctgccctctagttctcaggaattgttctaatcaaagagattatgttattttgcattccccaaaagtgatggcagggagagacagatctcaaaagtgtgacttttctgcacccaccttgctgaatcatcctgttgctctgcatggattctgggcagctataaagttatagtgtaaactcaggactaaaagtcaggatccctggattctgctgatcccaccctttcaacctaaaggtgtttgcatgacagtctcaaactcccttgtttctaaaataaaaataacggttcctcctcttacaaatcttcaggaagattaaatgaggtgtctggcattcactaagtggcttttgaagtgtatatggggtatcggaagagacttggatactttagggataattccgaactgtctttgcttcactctaatagttttgtgcttgaaccccataatatctttcctttgtgatttgtccctagtccttctctatggaacagagagattttacctctattcctctcaattataccttacattccatctggcaaaaccacaagcacatttttctactaaggattttttcttctgtattctaccttcttatttatttatttattatttattttttgaaacagagtctcgctcttgttgcccaggctggagtgcaatggcgtgaccttggctcaccgcaacttctgcctcccgggttcaagcgattctcctgccttagtatcctgagtagctgaaattacaggcaagcgccaccacgcccggctaattatttgtatttttagtagagatggggtttctccatgttggtcaggctggtctcgaactcctacctcaggtgatctgcccgcctcggcctcccaaaatgctgggattacaggcgtgaaccactatgcccagcctaccctcttaaaaaaacacaacctggtggtgtgctcctgtaattccagctacttgggaggctgaggcaggaggattgcttgaacccaggagttcaagaccagcctggccaacatagtgaaaccctgtctctaaaacaaacgaacaaacaagcaaaacaaaacccccacaacaaatggttactcagcttgtgcagcatcgatttcctaggcagcctctattaagtttggccttcaagtttctcccccagactctaactcagcataatgtcacatccaatagaatcatgtaactgaccctaaagagctttgacatgttaaacaactcattgcacatcctaaacattccttttagatactgaattagtttgttagggctgtcctaacaaagtactgcaaaccatgtggcttaaataatggaaattgattgcctcacacttttggaaagtctgaggtcaaggcatcagccaggccatgttccttttgaaggtaccacggaaggatgtattccaagcctctcttctaccttttgatagttccttggcttgtgattgcataactccattcttcatatgcatgtatatctgtgtccaaaattccctttttataacgacacagtcctattggattaggggcccaccatactccagtgtgacctcatcttaactaattataccggtaatgacactatttcaaaataagattacatcctgaggtacagggtaaggacttcaacatatgaattctggggggacaaaattcaacccataacagacactacgttttctttccaaatttctacagcacgtgacagctgtctaacctttcatgccccttcccctcaacacccccataaatgtgtctaaactatcctgagctgtctctagccagcaggtcatgaagtcctctacttattttcatcttatttgctggtagtggcctcattttttttgaaatatcacaatatgccagatactttatgtgtgtgattctaaaccttgaccatcttaagattatatccattttttttttttagagatgaggtcttgctatgtggcctagcctcatctcagactcctgggctcaaggtatatatcatttttttagttgaggaaaaaggctcaggaagttaattgatgcacaaaatgttaaacaggtcgggcgtggtggctcacacctgtaatcccagcactctgggaggccgaggcgggtggatcacttgaggtcaggagttcaagatcagcctatccaacatgacaaaaccccgtctctactaaaaacacaaaaaattagcctgcatggtggcatgcacttgtaatcccagttaatggggagactgaggcaggataaccacttgaacctgggaggcagaggttgcagtgagccgagatctggctgctgcactctagcctgggtgacagagtgagactctgtcaccaaaaaaaaaaaaaaaaaaaagcaaaaacaaacaaacaaaaaacacaaaatagtaaacagcagatagtgacagaggggaaattgagtgaggcttttccagtataaagttcaggcttagtccaactctgtcctggtgtcttttggaatattaggagatgttccagccaaattacaataatttatttttcctctgatagggcatcttattcagaggagaaaatctgaaagtcctttggattaaacagatgcttacggagcaacttcctaggcatgcaattctagcagaggagagagatggggttggtggaacaaccataggtttattcctgctctttaatagctgtgaaaaaacagatggtaggaggtgacccatctagaattgagttcaaatcctgcttcttacatggataaactgcatggccttgtgcacactcgagctgttctatgagcctctacttcttaatctttgaactagttttagatgtgactatctcacaggggagcatgaggattaaatgatatcatgaataaaaagtatctggcacgtagcgaattcctgataaatctccatttatctccctccctttccttgccttggaagtgtttggtttgggtccttcccaaagctatcatccaaattaagccaaaacactacatttgctttaatacaaatgtgcatgatagaagagtaatgaattaaaacatactggaaaaagggagtcctaattccataaggaaacaaaaataaggcagtatttgaatgtcacataaacctcttggttctagctggcaagccattccaccaggtcttaatagcaaaatattaaaacattaggtggaaccttgcagttgtgcaacttataattccattaaaaaataaagctatatttaaaaataagacacaattaatgaaggtttaaaataaaagcaagtaaacatcatgctgtagaaaggtaagtggcaggggcaaataggaaaaaggtgataataggacctcagttcctgggttgttgtttttttttctttttttgttctcctcttttttttctgttagctctgaggccaaatattcttgggaagaaatcgcaatttcttctgggcttatttccttgctggtaattaaaaaaaattttttttttagagacagggccgtgctctgttacccaggctggagggtagagagtaatgtgatcatggctcactgcagcctcaaattccttggctcaagcgatctttctgccttaccctgctgagtagctgggactacaggtgccagccaccatactcagctaattctttcacttcttatagagacgggctcttgctatgttgcccaggctggtctcaaactcttggtctcaagtgatcctcttgcctcagcttcccatagtgctgagattacaggcatgagtcactgctcctggtctgtaaaattcttagttctagttcttacaagattctaaggcttcattttatattgaaaagattgttttaaagactgagaagttggttccttcttgaagaacaaattgaatgaatcacaaatcaaatgaaccagaggcttggaataactcaatgccgtctattccaacactctctttagagtatttttagttttttccgagagagaaatataaaatgttcaatgcatctaatattgaagttaagaaaataaaatattcttctctcttggattcctattaaaaataaaattttcaaaatttttaaaagaacattcatttaaaagtatttcacttatgttttatattttataatatataatatattattatatattttataatatattataatatattatattttataatatatattataatatattatattataatatattataatatattatattttataatatatattataatatattatattataatatattataatatattatattttataatatatattataatatattatattttataatatatattataatatattatatattataatatgtaacatattattatattttgtaatatataatatattattatatattataatatataatatattattatatattataatatataatatactattatattttataatatataatatatatcatattttataatatataatatatcttatattttataatatataatatatcttatatattataatatataatatatcttatatattataatatataatatatattatatattataatatataatatagtattatattttatattttataatatattatattatatattatattttataatatatattatgttatatattatattttataatatataatatattatatattatattttataatatataatatattatatattatagaatataatatattatatattattatatattataaaatataatatattattatatattataaaatataatatattattatatattatattttataattattatatataatataatataatatattattatgtattatataatattgtatataattatatacaatattatatatatcattatatacataataattatatattcactggttatatataaaatcagtgtatatatattaatcactgaatatacataatgagaaatttaatatatattgaatatataatatatatattttatgggtgtttatatatagtcccatgaaatacatacattcggggaggagccaagatggccgaataggaacagctccggtctacagctcccagcgtgaccgacgcagaagaccggtgatttctgcatttccatctgaggtaccgggttcatctcactagggagtgccagacggtgggcgcaggccagtgggtgcgcgcacagtgcgcgagccgaagcaaggcattgcctcacctgggaagcgcaaggggtcagggagttccctttccgagtcaaagaaaggggtgacggacgcacctggaaaatcgggtcactcccacccgaatattgcgcttttcagaccggcttaaaaaacggcgcaccacgagactatatcccacacctggctctgagggtcctacgcccacggaatctcgctgattgctagcacagcagtctgtgatcaaactgcaaggcggcagcgaggctgggggaggggcgcccgccattgcccaggcttgcttaggtaaacaaagcagccaggaagctcgaactgggtggagcccaacacagctcaaggaggcctgcctgcctctgtaggctccacctctgggggcagggcacagacaaacaaaaagacagcagtaacctctgcagacttaaatgtccctgtctgacagctttgaagggagcagtggttctcccagcatgcagctggagatctgagaaccggcagactgcctcttcaagtgggtccctgacccctgaccccagagcagcctaactgggaggcaccccccagcaggggcacactgacacctcacacggcagggtattccaacagacctgcagctgagggtcctgtctgttagaaggaaaactaacaaacagaaaggacatccacaccaaaaacccatctgtacatcaccatcatcaaagaccaaaagtagataaaaccacaaagatggggaaaaaacagaacagaaaaactggaagctctaaaaatcagagcgcctctcctcctccaaaggaacgcagctcctcaccagcaacagaacaaagctggatggagaatgactttgacgagctgagagaagaaggcttcagacgatcaaattactctgagctacgggaggacattcaaaccaaaggcaaagaagttgaaaactttgaaaaaaatttagaagaacgtataactagaataaccaatacagagaagtgcttaaaggagctgatggagctgaaaaccaaggctcgagaactacgtgaagaatgcagaagcctcaggagccgatgcgatcaactggaagaaagggtgtcagcaatggaagacgaaatgaatgaagtgaagcgagaagggaagtttagagaaaaaagaataaaaagaaatgagcaaagcctccaagaaatatgggactatgtgaaaagaccaaatctacgtctgattggtgtacctgaaagtgatggggagaatggaaccaagttggaaaacactctgcaggatattatccaggagaacttccccaatctagcaaggcaggccaacgttcagattcaggaaatacagagaatgccacaaagatactcctcgagaagagcaactccaagacacataattgtcagattcaccaaagttgaaatgaaggaaaaaatgttaagggcagccagagagaaaggtcgggttaccctcaaagggaagcccatcagactaacagcggatctctcggcagaaaccctacaagccagaagagagtgggggccaatattcaacattcttaaagaaaagaattttcaacccagaatttcatatccagccaagctaagcttcataagtgaaggagaaataaaatacttttcagacaagcaaatgctgagagattttgtcaccaccagacctgccctaaaagagctcctgaaggaagcgctaaacatggaaaggaacaaccagtaccagccgctgcaaaatcatgccaaaatgtaaagaccatcgagactaggaagaaactgcatcaactaacgagcaaaatcaccagctaacatcataatgacaggatcaaattcacacataacaatattaactttaaatgtaaatgggctaaatgctccaattaaaagacacagactggcaagttggataaagagtcaagacccatcagtgtgctgtattcaggaaacccatctcacgtgcagagacacacataggctcaaaataaaaggatggaggaacatctaccaagcaaatggaaaacaaaaaaaggcaggggttgcaatcctagtctctgataaaacagactttaaaccaacaaagatcaaaagagacaaagaaggccattacataatggtaaagggatcaattcaacaagaagagctaactatcctaaatatatatgcacccaatacaggagcacccagattcataaagcaagtcctgagtgacctacaaagagacttagactcccacacaataattatgggagactttaacaccccactgtcaacattagacagatcaacgagacagaaagtcaacaaggatacccaggaattgaactcagctctgcaccaagtggacctaatagacatctacagaactctccaccctaaatcaacagaatatacatttttttcagcaccacaccacacctattccaaaattgaccacatacttcgaagtaaagctctcctcagcaaatgtaaaagaacagaaattataacaaactatctctcagaccacagtgcaatcaaactagaactcaggattaagaatctcactcaaagccgctcaactacatggaaactgaacaacctgctcctgaatgactactgggtacataacgaaatgaaggcagaaataaagatgttctttgaaaccaacgagaacaaagacacaacataccagaatctctgggatgcattcaaagcagtgtgtagagggaaatttatagcactaaatgcccacaagagaaagcaggaacgatccaaaattgacaccctaacatcacaattagaagaactagaaaagcaagagcaaacacattcaaaagctagcagaaggcaagaaataactaaaatcagagcagaactgaaggaaatagagacacaaaaaacccttcaaaaaatcagtgaatccaggagctggttttttgaaaggatcaacaaaattgatagaccgctagcaagactaataaagaaaaaaagagagaagaatcaaatagacacaataaaaaatgacaaaggggatatcaccaccgatcccacagaaatacaaactaccatcagagaatactacaaacacctctacgcaaataaactagaaaatctagaagaaat
